United States Patent Application Publication US 2025/0320254 A1 - sequence listing, part 13

SEQ ID NO: 67784 - protein, 34 aa, Homo sapiens
RTALMIITAGLLACPSHPMHPFCQIIRMREWKTS

SEQ ID NO: 67785 - protein, 284 aa, Homo sapiens
LLTLLLLWHWDTTQSLKQLEERAARNVSQVSKNLESHHGDQMAQKSQSTQISQELEELRAEQQRLKSQDLELSWNLNGLQADLSSFKSQELNERNEASDLLERLREEVTKLRMELQVSSGFVCNTCPEKWINFQRKCYYFGKGTKQWVHARYACDDMEGQLVSIHSPEEQDFLTKHASHTGSWIGLRNLDLKGEFIWVDGSHVDYSNWAPGEPTSRSQGEDCVMMRGSGRWNDAFCDRKLGAWVCDRLATCTPPASEGSAESMGPDSRPDPDGRLPTPSAPLHS

SEQ ID NO: 67786 - protein, 14 aa, Homo sapiens
IIVLIVVLVGVKSR

SEQ ID NO: 67787 - protein, 12 aa, Homo sapiens
TCLICLLLTGMQ

SEQ ID NO: 67788 - protein, 20 aa, Homo sapiens
LSFFLSGYLSSLEWVLVHIC

SEQ ID NO: 67789 - protein, 14 aa, Homo sapiens
TCAEVLLVLVVVPV

SEQ ID NO: 67790 - protein, 45 aa, Homo sapiens
KSIGWLVHLSVWSVAVFLPDQMSRLVSEGQCEKKIVSELEKLLED

SEQ ID NO: 67791 - protein, 122 aa, Homo sapiens
MFLFLGGFSMGGCMAIHLAYRNHQDVAGVFALSSFLNKASAVYQALQKSNGVLPELFQCHGTADELVLHSWAEETNSMLKSLGVTTKFHSFPNVYHELSKTELDILKLWILTKLPGEMEKQK

SEQ ID NO: 67792 - protein, 103 aa, Homo sapiens [sequence omitted]

SEQ ID NO: 67793 - protein, 19 aa, Homo sapiens
MKRKNQKSSPLLTLLLWLG

SEQ ID NO: 67794 - protein, 4413 aa, Homo sapiens
MNDSTGQSLTALSCACLFSLVASWGETGRTLQAISAILTNNGSHACQTIQVPTILNSLQRSVQAVLVGKIQIQDWFSNGIKKAALMHKWPLKEISVDEDDQCLLQNDGFFLYLLCKDGLYKIGSGYSGTVRGHIYNSTSRIRNRKEKKSWLGYAQGYLLYRDVNNHSMTAIRISPETLEQDGTVMLPDCHTEGQNILFTDGEYINQIAASRDDGFVVRIFATSTEPVLQQELQLKLARKCLHACGISLFDLEKDLHIISTGFDEESAILGAGREFALMKTANGKIYYTGKYQSLGIKQGGPSAGKWVELPITKSPKIVHFSVGHDGSHALLVAEDGSIFFTGSASKGEDGESTKSRRQSKPYKPKKIIKMEGKIVVYTACNNGSSSVISKDGELYMFGKDAIYSDSSSLVTDLKGHFVTQVAMGKAHTCVLMKNGEVWTFGVNNKGQCGRDTGAMNQGGKGFGVENMATAMDEDLEEELDEKDEKSMMCPPGMHKWKLEQCMVCTVCGDCTGYGASCVSSGRPDRVPGGICGCGSGESGCAVCGCCKACARELDGQEARQRGILDAVKEMIPLDLLLAVPVPGVNIEEHLQLRQEEKRQRVIRRHRLEEGRGPLVFAGPIFMNHREQALARLRSHPAQLKHKRDKHKDGSGERGEKDASKITTYPPGSVRFDCELRAVQVSCGFHHSVVLMENGDVYTFGYGQHGQLGHGDVNSRGCPTLVQALPGPSTQVTAGSNHTAVLLMDGQVFTFGSFSKGQLGRPILDVPYWNAKPAPMPNIGSKYGRKATWIGASGDQTFLRIDEALINSHVLATSEIFASKHIIGLVPASISEPPPFKCLLINKVDGSCKTFNDSEQEDLQGFGVCLDPVYDVIWRFRPNTRELWCYNAVVADARLPSAADMQSRCSILSPELALPTGSRALTTRSHAALHILGCLDTLAAMQDLKMGVASTEEETQAVMKVYSKEDYSVVNRFESHGGGWGYSAHSVEAIRFSADTDILLGGLGLFGGRGEYTAKIKLFELGPDGGDHETDGDLLAETDVLAYDCAAREKYAMMFDEPVLLQAGWWYVAWARVSGPSSDCGSHGQASITTDDGVVFQFKSSKKSNNGTDVNAGQIPQLLYRLPTSDGSASKGKQQTSEPVHILKRSFARTVSVECFESLLSILHWSWTTLVLGVEELRGLKGFQFTATLLDLERLRFVGTCCLRLLRVYTCEIYPVSATGKAVVEETSKLAECIGKTRTLLRKILSEGVDHCMVKLDNDPQGYLSQPLSLLEAVLQECHNTFTACFHSFYPTPALQWACLCDLLNCLDQDIQEANFKTSSSRLLAAVMSALCHTSVKLTSIFPIAYDGEVLLRSIVKQVSTENDSTLVHRFPLLVAHMEKLSQSEENISGMTSFREVLEKMLVIVVLPVRNSLRRENELFSSHLVSNTCGLLASIVSELTASALGSEVDGLNSLHSVKASANRFTKTSQGRSWNTGNGSPDAICFSVDKPGIVVVGFSVYGGGGIHEYELEVLVDDSEHAGDSTHSHRWTSLELVKGTYTTDDSPSDIAEIRLDKVVPLKENVKYAVRLRNYGSRTANGDGGMTTVQCPDGVTFTFSTCSLSSNGTNQTRGQIPQILYYRSEFDGDLQSQLLSKANEEDKNCSRALSVVSTVVRASKDLLHRALAVDADDIPELLSSSSLFSMLLPLIIAYIGPVAAAIPKVAVEVFGLVQQLLPSVAILNQKYAPPAFNPNQSTDSTTGNQPEQGLSACTTSSHYAVIESEHPYKPACVMHYKVTFPECVRWMTIEFDPQCGTAQSEDVLRLLIPVRTVQNSGYGPKLTSVHENLNSWIELKKFSGSSGWPTMVLVLPGNEALFSLETASDYVKDDKASFYGFKCFAIGYEFSPGPDEGVIQLEKELANLGGVCAAALMKKDLALPIGNELEEDLEILEEAALQVCKTHSGILGKGLALSHSPTILEALEGNLPLQIQSNEQSFLDDFIACVPGSSGGRLARWLQPDSYADPQKTSLILNKDDIRCGWPTTITVQTKDQYGDVVHVPNMKVEVKAVPVSQKKMSLQQDQAKKPQRIPGSPAVTAASSNTDMTYGGLASPKLDVSYEPMIVKEARYIAITMMKVYENYSFEELRFASPTPKRPSENMLIRVNNDGTYCANWTPGAIGLYTLHVTIDGIEIDAGLEVKVKDPPKGMIPPGTQLVKPKSEPQPNKVRKFVAKDSAGLRIRSHPSLQSEQIGIVKVNGTITFIDEIHNDDGVWLRLNDETIKKYVPNMNGYTEAWCLSFNQHLGKSLLVPVDESKTNTDDFFKDINSCCPQEATMQEQDMPFLRGGPGMYKVVKTGPSGHNIRSCPNLRGIPIGMLVLGNKVKAVGEVTNSEGTWVQLDQNSMVEFCESDEGEAWSLARDRGGNQYLRHEDEQALLDQNSQTPPPSPFSVQAFNKGASCSAQGFDYGLGNSKGDRGNISTSSKPASTSGKSELSSKHSRSLKPDGRMSRTTADQKKPRGTESLSASESLILKSDAAKLRSDSHSRSLSPNHNTLQTLKSDGRMPSSSRAESPGPGSRLSSPKPKTLPANRSSPSGASSPRSSSPHDKNLPQKSTAPVKTKLDPPRERSKSDSYTLDPDTLRKKKMPLTEPLRGRSTSPKPKSVPKDSTDSPGSENRAPSPHVVQENLHSEVVEVCTSSTLKTNSLTDSTCDDSSEFKSVDEGSNKVHFSIGKAPLKDEQEMRASPKISRKCANRHTRPKKEKSSFLFKGDGSKPLEPAKQAMSPSVAECARAVFASFLWHEGIVHDAMACSSFLKFHPELSKEHAPIRSSLNSQQPTEEKETKLKNRHSLEISSALNMFNIAPHGPDISKMGSINKNKVLSMLKEPPLHEKCEDGKTETTFEMSMHNTMKSKSPLPLTLQHLVAFWEDISLATIKAASQNMIFPSPGSCAVLKKKECEKENKKSKKEKKKKEKAEVRPRGNLFGEMAQLAVGGPEKDTICELCGESHPYPVTYHMRQAHPGCGRYAGGQGYNSIGHFCGGWAGNCGDGGIGGSTWYLVCDRCREKYLREKQAAAREKVKQSRRKPMQVKTPRALPTMEAHQVIKANALFLLSLSSAAEPSILCYHPAKPFQSQLPSVKEGISEDLPVKMPCLYLQTLARHHHENFVGYQDDNLFQDEMRYLRSTSVPAPYISVTPDASPNVFEEPESNMKSMPPSLETSPITDTDLAKRTVFQRSYSVVASEYDKQHSILPARVKAIPRRRVNSGDTEVGSSLLRHPSPELSRLISAHSSLSKGERNFQWPVLAFVIQHHDLEGLEIAMKQALRKSACRVFAMEAFNWLLCNVIQTTSLHDILWHFVASLTPAPVEPEEEEDEENKTSKENSEQEKDTRVCEHPLSDIVIAGEAAHPLPHTFHRLLQTISDLMMSLPSGSSLQQMALRCWSLKFKQSDHQFLHQSNVFHHINNILSKSDDGDSEESFSISIQSGFEAMSQELCIVMCLKDLTSIVDIKTSSRPAMIGSLTDGSTETFWESGDEDKNKTKNITINCVKGINARYVSVHVDNSRDLGNKVTSMTFLTGKAVEDLCRIKQVDLDSRHIGWVTSELPGGDNHIIKIELKGPENTLRVRQVKVLGWKDGESTKIAGQISASVAQQRNCEAETLRVFRLITSQVFGKLISGDAEPTPEQEEKALLSSPEGEEKVYNATSDADLKEHMVGIIFSRSKLTNLQKQVCAHIVQAIRMEATRVREEWEHAISSKENANSQPNDEDASSDAYCFELLSMVLALSGSNVGRQYLAQQLTLLQDLFSLLHTASPRVQRQVTSLLRRVLPEVTPSRLASIIGVKSLPPADISDIIHSTEKGDWNKLGILDMFLGCIAKALTVQLKAKGTTITGTAGTTVGKGVTTVTLPMIFNSSYLRRGESHWWMKGSTPTQISEIIIKLIKDMAAGHLSEAWSRVTKNAIAETIIALTKMEEEFRSPVRCIATTRLWLALASLCVLDQDHVDRLSSGRWMGKDGQQKQMPMCDNHDDGETAAIILCNVCGNLCTDCDRFLHLHRRTKTHQRQVFKEEEEAIKVDLHEGCGRTKLFWLMALADSKTMKAMVEFREHTGKPTTSSSEACRFCGSRSGTELSAVGSVCSDADCQEYAKIACSKTHPCGHPCGGVKNEEHCLPCLHGCDKSATSLKQDADDMCMICFTEALSAAPAIQLDCSHIFHLQCCRRVLENRWLGPRITFGFISCPICKNKINHIVLKDLLDPIKELYEDVRRKALMRLEYEGLHKSEAITTPGVRFYNDPAGYAMNRYAYYVCYKCRKAYFGGEARCDAEAGRGDDYDPRELICGACSDVSRAQMCPKHGTDFLEYKCRYCCSVAVFFCFGTTHFCNACHDDFQRMTSIPKEELPHCPAGPKGKQLEGTECPLHVVHPPTGEEFALGCGVCRNAHTF

SEQ ID NO: 67795 - protein, 18 aa, Homo sapiens
MDVALHCLVFILTLVSLP

SEQ ID NO: 67796 - protein, 758 aa, Homo sapiens [sequence omitted]

SEQ ID NO: 67797 - protein, 128 aa, Homo sapiens
MAPRALLLLLSGGLALTETWACSHSMRYFDTAVSRPGRGEPRFISVGYVDDTQFVRFDSDAASPRGEPRAPWVEQEGPEYWDRETQKYKRQAQADRVSLRNLRGYYNQSEDEDVWLRPGARRAPPPRV

SEQ ID NO: 67798 - protein, 117 aa, Homo sapiens
LWTAVLFLAPVAGTPAAPPKAVLKLEPQWINVLQEDSVTLTCRGTHSPESDSIQWFHNGNLIPTHTQPSYRFKANNNDSGEYTCQTGQTSLSDPVHLTVLSGQWRKAPGWTWEGQDG

SEQ ID NO: 67799 - protein, 42 aa, Homo sapiens
LLLLLVAASAMVRSEASANLGGVPSKRLKMQYATGPLLKFQI

SEQ ID NO: 67800 - protein, 47 aa, Homo sapiens
VTVIAVVLLVFGVAAYLKIRHSSYGRLLDDHDYGSWGNYNNPLYDDS

SEQ ID NO: 67801 - protein, 227 aa, Homo sapiens
LLEPLWLLSAEWKRVLLFVSLAMALQLSREQGITLRGSAEIVAEFFSFGINSILYQRGIYPSETFTRVQKYGLTLLVTTDLELIKYLNNVVEQLKDWLYKCSVQKLVVVISNIESGEVLERWQFDIECDKTAKDDSAPREKSQKAIQDEIRSVIRQITATVTFLPLLEVSCSFDLLIYTDKDLVVPEKWEESGPQFITNSEEVRLRSFTTTIHKVNSMVAYKIPVND

SEQ ID NO: 67802 - protein, 700 aa, Homo sapiens
IAQLFAVGALVCCLVLLHLSAMISASRAAAARLVGAAASRGPTAARHQDSWNGLSHEAFRLVSRRDYASEAIKGAVVGIDLGTTNSCVAVMEGKQAKVLENAEGARTTPSVVAFTADGERLVGMPAKRQAVTNPNNTFYATKRLIGRRYDDPEVQKDIKNVPFKIVRASNGDAWVEAHGKLYSPSQIGAFVLMKMKETAENYLGHTAKNAVITVPAYFNDSQRQATKDAGQISGLNVLRVINEPTAAALAYGLDKSEDKVIAVYDLGGGTFDISILEIQKGVFEVKSTNGDTFLGGEDFDQALLRHIVKEFKRETGVDLTKDNMALQRVREAAEKAKCELSSSVQTDINLPYLTMDSSGPKHLNMKLTRAQFEGIVTDLIRRTIAPCQKAMQDAEVSKSDIGEVILVGGMTRMPKVQQTVQDLFGRAPSKAVNPDEAVAIGAAIQGGVLAGDVTDVLLLDVTPLSLGIETLGGVFTKLINRNTTIPTKKSQVFSTAADGQTQVEIKVCQGEREMAGDNKLLGQFTLIGIPPAPRGVPQIEVTFDIDANGIVHVSAKDKGTGREQQIVIQSSGGLSKDDIENMVKNAEKYAEEDRRKKERVEAVNMAEGIIHDTETKMEEFKDQLPADECNKLKEEISKMRELLARKDSETGENIRQAASSLQQASLKLFEMAYKKMASEREGSGSSGTGEQKEDQKEEKQ

SEQ ID NO: 67803 - protein, 51 aa, Homo sapiens
LVLLGAVVTGAVVTAVMWRKKSSDRKGGSYSQAASSQSAQGSDVSLTACKV

SEQ ID NO: 67804 - protein, 246 aa, Homo sapiens
LGTVVALKVVLYLLRVCLAMAWKSGGASHSELIHNLRKNGIIKTDKVFEVMLATDRSHYAKCNPYMDSPQSIGFQATISAPHMHAYALELLFDQLHEGAKALDVGSGSGILTACFARMVGCTGKVIGIDHIKELVDDSVNNVRKDDPTLLSSGRVQLVVGDGRMGYAEEAPYDAIHVGAAAPVVPQALIDQLKPGGRLILPVGPAGGNQMLEQYDKLQDGSIKMKPLMGVIYVPLTDKEKQWSRWK

SEQ ID NO: 67805 - protein, 45 aa, Homo sapiens
LWCVVLVLQVVQWKSEATPYRPLERGDPEWSSETDALVGSRLSHS

SEQ ID NO: 67806 - protein, 18 aa, Homo sapiens
KRKNQKSSPLLTLLLWLG

SEQ ID NO: 67807 - protein, 636 aa, Homo sapiens
LRLLLLLWAAAASAQGHLRSGPRIFAVWKGHVGQDRVDFGQTEPHTVLFHEPGSSSVWVGGRGKVYLFDFPEGKNASVRTVNIGSTKGSCLDKRDCENYITLLERRSEGLLACGTNARHPSCWNLVNGTVVPLGEMRGYAPFSPDENSLVLFEGDEVYSTIRKQEYNGKIPRFRRIRGESELYTSDTVMQNPQFIKATIVHQDQAYDDKIYYFFREDNPDKNPEAPLNVSRVAQLCRGDQGGESSLSVSKWNTFLKAMLVCSDAATNKNFNRLQDVFLLPDPSGQWRDTRVYGVFSNPWNYSAVCVYSLGDIDKVFRTSSLKGYHSSLPNPRPGKCLPDQQPIPTETFQVADRHPEVAQRVEPMGPLKTPLFHSKYHYQKVAVHRMQASHGETFHVLYLTTDRGTIHKVVEPGEQEHSFAFNIMEIQPFRRAAAIQTMSLDAERRKLYVSSQWEVSQVPLDLCEVYGGGCHGCLMSRDPYCGWDQGRCISIYSSERSVLQSINPAEPHKECPNPKPDKAPLQKVSLAPNSRYYLSCPMESRHATYSWRHKENVEQSCEPGHQSPNCILFIENLTAQQYGHYFCEAQEGSYFREAQHWQLLPEDGIMAEHLLGHACALAASLWLGVLPTLTLGLLVH

SEQ ID NO: 67808 - protein, 132 aa, Homo sapiens
RLWSSISLLFFPSAKMALETVPKDLRHLRACLLCSLVKTIDQFEYDGCDNCDAYLQMKGNREMVYDCTSSSFDGIIAMMSPEDSWVSKWQRVSNFKPGVYAVSVTGRLPQGIVRELKSRGVAYKSRDTAIKT

SEQ ID NO: 67809 - protein, 216 aa, Homo sapiens
LLLAAACAVFLACPWAVSGARASPGSAASPRLREGPELSPDDPAGLLDLRQGMFAQLVAQNVLLIDGPLSWYSDPGLAGVSLTGGLSYKEDTKELVVAKAGVYYVFFQLELRRVVAGEGSGSVSLALHLQPLRSAAGAAALALTVDLPPASSEARNSAFGFQGRLLHLSAGQRLGVHLHTEARARHAWQLTQGATVLGLFRVTPEIPAGLPSPRSE

SEQ ID NO: 67810 - protein, 20 aa, Homo sapiens
LVVLGVVLLGQFVVRRFFKS

SEQ ID NO: 67811 - protein, 142 aa, Homo sapiens
LRAPLLLLAILAVALAVSPAAGSSPGKPPRLVGGPMDASVEEEGVRRALDFAVGEYNKASNDMYHSRALQVVRARKQIVAGVNYFLDVELGRTTCTKTQPNLDNCPFHDQPHLKRKAFCSFQIYAVPWQGTMTLSKSTCQDA

SEQ ID NO: 67812 - protein, 253 aa, Homo sapiens
KELLYVPLIGWTWYFLEIVFCKRKWEEDRDTVVEGLRRLSDYPEYMWFLLYCEGTRFTETKHRVSMEVAAAKGLPVLKYHLLPRTKGFTTAVKCLRGTVAAVYDVTLNFRGNKNPSLLGILYGKKYEADMCVRRFPLEDIPLDEKEAAQWLHKLYQEKDALQEIYNQKGMFPGEQFKPARRPWTLLNFLSWATILLSPLFSFVLGVFASGSPLLILTFLGFVGAASFGVRRLIGVTEIEKGSSYGNQEFKKKE

SEQ ID NO: 67813 - protein, 290 aa, Homo sapiens
VLFPVWFLYSLLMKLFQRSTPAITLESPDIKYPLRLIDREIISHDTRRFRFALPSPQHILGLPVGQHIYLSARIDGNLVVRPYTPISSDDDKGFVDLVIKVYFKDTHPKFPAGGKMSQYLESMQIGDTIEFRGPSGLLVYQGKGKFAIRPDKKSNPIIRTVKSVGMIAGGTGITPMLQVIRAIMKDPDDHTVCHLLFANQTEKDILLRPELEELRNKHSARFKLWYTLDRAPEAWDYGQGFVNEEMIRDHLPPPEEEPLVLMCGPPPMIQYACLPNLDHVGHPTERCFVF

SEQ ID NO: 67814 - protein, 18 aa, Homo sapiens
IVLFFIYHFMQAEEGNPF

SEQ ID NO: 67815 - protein, 325 aa, Homo sapiens
MYSLLHVSCLLKLFYTFLYVSIQSVASIGNTLNSVHLAVEALQKTVDEHKKTMELLQSDMNQHFLKETPGSNQIIPSPSATSELDNKTHSENLKQDILYLHNSLEEVNSALVGYQRQNDLKLEGMNETVSNLTQRVNLIESDVVAMSKVEKKANLSFSMMGDRSATLKRQSLDQVTNRTDTVKIQSIKKEDSSNSQVSKLREKLQLISALTNKPESNRPPETADEEQVESFTSKPSALPKFSQFLGDPVEKAAQLRPISLPGVSSTEDLQDLFRKTGQDVDGKLTYQEIWTSLGSAMPEPESLRAFDSDGDGRYSFLELRVALGI

SEQ ID NO: 67816 - protein, 70 aa, Homo sapiens
MVGPAPRRRLRPLAALALVLALAPGLPTARAGQTPRPAERGPPVRLFTEEELARYGGEESFMDEEPPTMP

SEQ ID NO: 67817 - protein, 454 aa, Homo sapiens [sequence omitted]

SEQ ID NO: 67818 - protein, 43 aa, Homo sapiens
MWKNLGSGSVFVTWFSLVMILSGIGPLGDAEDSISDVSHRLRP

SEQ ID NO: 67819 - protein, 115 aa, Homo sapiens
MVPIQTLRISTATLLSIMLCIVRAPHWQKNCFSMVKILKHWTSDPFGAGVPDIDIWDPDTIDRSESSKFVPPRRNLHLHWEALATVPLKLLIPQMLMFATNSIVKWGLGTIQEIS

SEQ ID NO: 67820 - protein, 80 aa, Homo sapiens
MNVRYVGRLILRVHSLLVIIEFILVRNPMNIGNVERTLIMTHNLFSIKICTGDETEYMKCVGRLLIMAQNRIYLVNNSSR

SEQ ID NO: 67821 - protein, 40 aa, Homo sapiens
MSRHLAFIRVVMVLTVVDVLPPDMLESLHFGNNFKCKSLI

SEQ ID NO: 67822 - protein, 472 aa, Homo sapiens
MPLALLVLLLLGPGGWCLAEPPRDSLREELVITPLPSGDVAATFQFRTRWDSELQREGDTDHYFLRYAVLPREVVCTENLTPWKKLLPCSSKAGLSVLLKADRLFHTSYHSQAVHIRPVCRNARCTSISWELRQTLSVVFDAFITGQGKKDWSLFRMFSRTLTEPCPLASESRVYVDITTYNQDNETLEVHPPPTTTYQDVILGTRKTYAIYDLLDTAMINNSRNLNIQLKWKRPPENEAPPVPFLHAQRYVSGYGLQKGELSTLLYNTHPYRAFPVLLLDTVPWYLRLYVHTLTITSKGKENKPSYIHYQPAQDRLQPHLLEMLIQLPANSVTKVSIQFERALLKWTEYTPDPNHGFYVSPSVLSALVPSMVAAKPVDWEESPLFNSLFPVSDGSNYFVRLYTEPLLVNLPTPDFSMPYNVICLTCTVVAVCYGSFYNLLTRTFHIEEPRTGGLAKRLANLIRRARGVPPL

SEQ ID NO: 67823 - protein, 97 aa, Homo sapiens
MPLALLVLLLLGPGGWCLAEPPRDSLREELVITPLPSGDVAATFQFRTRWDSELQREGDTDHYFLRYAVLPREVVCTENLTPWKKLLPCSSKASLCC

SEQ ID NO: 67824 - protein, 199 aa, Homo sapiens
MPLALLVLLLLGPGGWCLAEPPRDSLREELVITPLPSGDVAATFQFRTRWDSELQREGVSHYRLFPKALGQLISKYSLRELHLSFTQGFWRTRYWGPPFLQAPSGAELWVWFQDTVTDVDKSWKELSNVLSGIFCASLNFIDSTNTVTPTASFKPLGLANDTDHYFLRYAVLPREVVCTENLTPWKKLLPCSSKASLCC

SEQ ID NO: 67825 - protein, 35 aa, Homo sapiens
MRPTLLWSLLLLLGVFAAAAAAPPANFGDLPRMVQ

SEQ ID NO: 67826 - protein, 161 aa, Homo sapiens [sequence omitted]

SEQ ID NO: 67827 - protein, 24 aa, Homo sapiens
MNPKSKKLKTPLIYLILMGLEPSM

SEQ ID NO: 67828 - protein, 446 aa, Homo sapiens [sequence omitted]

SEQ ID NO: 67829 - protein, 198 aa, Homo sapiens [sequence omitted]

SEQ ID NO: 67830 - protein, 174 aa, Homo sapiens
MLLLILIMVHPGSCALWVSQPPEIRTLEGSSAFLPCSFNASQGRLAIGSVTWFRDEVVPGKEVRNGTPEFRGRLAPLASSRFLHDHQAELHIRDVRGHDASIYVCRVEVLGLGVGTGNGTRLVVEKEHPQLGAGTVLLLRAGFYAVSFLSVAVGSTVYYQGKYAKSTLSGFPQL

SEQ ID NO: 67831 - protein, 162 aa, Homo sapiens
MLLLILIMVHPGSCALWVSQPPEIRTLEGSSAFLPCSFNASQGRLAIGSVTWFRDEVVPGKEAELHIRDVRGHDASIYVCRVEVLGLGVGTGNGTRLVVEKEHPQLGAGTVLLLRAGFYAVSFLSVAVGSTVYYQGKCHCHMGTHCHSSDGPRGVIPEPRCP

SEQ ID NO: 67832 - protein, 187 aa, Homo sapiens
MLLLILIMVHPGSCALWVSQPPEIRTLEGSSAFLPCSFNASQGRLAIGSVTWFRDEVVPGKEVRNGTPEFRGRLAPLASSRFLHDHQAELHIRDVRGHDASIYVCRVEVLGLGVGTGNGTRLVVEKEHPQLGAGTVLLLRAGFYAVSFLSVAVGSTVYYQGKCHCHMGTHCHSSDGPRGVIPEPRCP

SEQ ID NO: 67833 - protein, 476 aa, Homo sapiens
MLVLLLHAVVLGLPSAWAVGACARACPAACACSTVERGCSVRCDRAGLLRVPAELPCEAVSIDLDRNGLRFLGERAFGTLPSLRRLSLRHNNLSFITPGAFKGLPRLAELRLAHNGDLRYLHARTFAALSRLRRLDLAACRLFSVPERLLAELPALRELAAFDNLFRRVPGALRGLANLTHAHLERGRIEAVASSSLQGLRRLRSLSLQANRVRAVHAGAFGDCGVLEHLLLNDNLLAELPADAFRGLRRLRTLNLGGNALDRVARAWFADLAELELLYLDRNSIAFVEEGAFQNLSGLLALHLNGNRLTVLAWVAFQPGFFLGRLFLFRNPWCCDCRLEWLRDWMEGSGRVTDVPCASPGSVAGLDLSQVTFGRSSDGLCVDPEELNLTTSSPGPSPEPAATTVSRFSSLLSKLLAPRVPVEEAANTTGGLANASLSDSLSSRGVGGAGRQPWFLLASCLLPSVAQHVVFGLQMD

SEQ ID NO: 67834 - protein, 102 aa, Homo sapiens
IFALGIIIWAMLERITFIDTETKKELLGSYVKQGTEIVPVGEALLENPKMELLIPVKKKSMNGRMKQLIKEMLAANPQDRPDAFELELRLVQIAFKDSSWET

SEQ ID NO: 67835 - protein, 795 aa, Homo sapiens
KHPGMWNMLIVAMCLALLGCLQAQELQGHVSIILLGATGDLAKKYLWQGLFQLYLDEAGRGHSFSFHGAALTAPKQGQELMAKALESLSCPKDMAPSHCAEHKDQFLQLSQYRQLKTAEDYQALNKDIEAQLQHAGLREAGRIFYFSVPPFAYEDIARNINSSCRPGPGAWLRVVLEKPFGHDHFSAQQLATELGTFFQEEEMYRVDHYLGKQAVAQILPFRDQNRKALDGLWNRHHVERVEIIMKETVDAEGRTSFYEEYGVIRDVLQNHLTEVLTLVAMELPHNVSSAEAVLRHKLQVFQALRGLQRGSAVVGQYQSYSEQVRRELQKPDSFHSLTPTFAAVLVHIDNLRWEGVPFILMSGKALDERVGYARILFKNQACCVQSEKHWAAAQSQCLPRQLVFHIGHGDLGSPAVLVSRNLFRPSLPSSWKEMEGPPGLRLFGSPLSDYYAYSPVRERDAHSVLLSHIFHGRKNFFITTENLLASWNFWTPLLESLAHKAPRLYPGGAENGRLLDFEFSSGRLFFSQQQPEQLVPGPGPAPMPSDFQVLRAKYRESPLVSAWSEELISKLANDIEATAVRAVRRFGQFHLALSGGSSPVALFQQLATAHYGFPWAHTHLWLVDERCVPLSDPESNFQGLQAHLLQHVRIPYYNIHPMPVHLQQRLCAEEDQGAQIYAREISALVANSSFDLVLLGMGADGHTASLFPQSPTGLDGEQLVVLTTSPSQPHRRMSLSLPLINRAKKVAVLVMGRMKREITTLVSRVGHEPKKWPISGVLPHSGQLVWYMDYDAFLG

SEQ ID NO: 67836 - protein, 34 aa, Homo sapiens
RKLLGAAWGLSFLLAFPQVSDLGLRTGQDRDLGP

SEQ ID NO: 67837 - protein, 852 aa, Homo sapiens
IPRMLLVLFLLLPILSSAKAQVNPAICRYPLGMSGGQIPDEDITASSQWSESTAAKYGRLDSEEGDGAWCPEIPVEPDDLKEFLQIDLHTLHFITLVGTQGRHAGGHGIEFAPMYKINYSRDGTRWISWRNRHGKQVLDGNSNPYDIFLKDLEPPIVARFVRFIPVTDHSMNVCMRVELYGCVWLDGLVSYNAPAGQQFVLPGGSIIYLNDSVYDGAVGYSMTEGLGQLTDGVSGLDDFTQTHEYHVWPGYDYVGWRNESATNGYIEIMFEFDRIRNFTTMKVHCNNMFAKGVKIFKEVQCYFRSEASEWEPNAISFPLVLDDVNPSARFVTVPLHHRMASAIKCQYHFADTWMMFSEITFQSDAAMYNNSEALPTSPMAPTTYDPMLKVDDSNTRILIGCLVAIIFILLAIIVIILWRQFWQKMLEKASRRMLDDEMTVSLSLPSDSSMFNNNRSSSPSEQGSNSTYDRIFPLRPDYQEPSRLIRKLPEFAPGEEESGCSGVVKPVQPSGPEGVPHYAEADIVNLQGVTGGNTYSVPAVTMDLLSGKDVAVEEFPRKLLTFKEKLGEGQFGEVHLCEVEGMEKFKDKDFALDVSANQPVLVAVKMLRADANKNARNDFLKEIKIMSRLKDPNIIHLLAVCITDDPLCMITEYMENGDLNQFLSRHEPPNSSSSDVRTVSYTNLKFMATQIASGMKYLSSLNFVHRDLATRNCLVGKNYTIKIADFGMSRNLYSGDYYRIQGRAVLPIRWMSWESILLGKFTTASDVWAFGVTLWETFTFCQEQPYSQLSDEQVIENTGEFFRDQGRQTYLPQPAICPDSVYKLMLSCWRRDTKNRPSFQEIHLLLLQQGDE

SEQ ID NO: 67838 - protein, 22 aa, Homo sapiens
LFGATAVALGGVALSVVTPARN

SEQ ID NO: 67839 - protein, 20 aa, Homo sapiens
RSLSSFTASSASLCLCCVCG

SEQ ID NO: 67840 - protein, 313 aa, Homo sapiens
VGLLLLLWLSLPVRLPSFVVSQRCAGLLLAALRIQGVGCQVQVWKALLQEMPLTALLRNLGKMTANSVLEPGNSEVSLVCEKLCNEKLLKKARIHPFHILIALETYKTGHGLRGKLKWRPDEEILKALDAAFYKTFKTVEPTGKRFLLAVDVSASMNQRVLGSILNASTVAAAMCMVVTRTEKDSYVVAFSDEMVPCPVTTDMTLQQVLMAMSQIPAGGTDCSLPMIWAQKTNTPADVFIVFTDNETFAGGVHPAIALREYRKKMDIPAKLIVCGMTSNGFTIADPDDRGMLDMCGFDTGALDVIRNFTLDMI

SEQ ID NO: 67841 - protein, 11 aa, Homo sapiens
VLHVLFLYFGL

SEQ ID NO: 67842 - protein, 11 aa, Homo sapiens
VLHVLFLYFGL

SEQ ID NO: 67843 - protein, 63 aa, Homo sapiens
IMELALLCGLVVMAGVIPIQGGILNLNKMVKQVTGKMPILSYWPYGCHCGLGGRGQPKDATDC

SEQ ID NO: 67844 - protein, 297 aa, Homo sapiens
ILSAVSLLLKFEMLYLIGLGLGDAKDITVKGLEVVRRCSRVYLEAYTSVLTVGKEALEEFYGRKLVVADREEVEQEADNILKDADISDVAFLVVGDPFGATTHSDLVLRATKLGIPYRVIHNASIMNAVGCCGLQLYKFGETVSIVFWTDTWRPESFFDKVKKNRQNGMHTLCLLDIKVKEQSLENLIKGRKIYEPPRYMSVNQAAQQLLEIVQNQRIRGEEPAVTEETLCVGLARVGADDQKIAAGTLRQMCTVDLGEPLHSLIITGGSIHPMEMEMLSLFSIPENSSESQSINGL

SEQ ID NO: 67845 - protein, 24 aa, Homo sapiens
LLKKWMGYFELELLTVVMIECFAE

SEQ ID NO: 67846 - protein, 33 aa, Homo sapiens
LSWLLLYVVTVLCSKENDSTCSFSLVEVTLVSC

SEQ ID NO: 67847 - protein, 391 aa, Homo sapiens
KREGQIANVWSLVSRLPFLGALGVAVAVAEIGCTMSAFEKPQIIAHIQKGFNYTVFDCKWVPCSAKFVTMGNFARGTGVIQLYEIQHGDLKLLREIEKAKPIKCGTFGATSLQQRYLATGDFGGNLHIWNLEAPEMPVYSVKGHKEIINAIDGIGGLGIGEGAPEIVTGSRDGTVKVWDPRQKDDPVANMEPVQGENKRDCWTVAFGNAYNQEERVVCAGYDNGDIKLFDLRNMALRWETNIKNGVCSLEFDRKDISMNKLVATSLEGKFHVFDMRTQHPTKGFASVSEKAHKSTVWQVRHLPQNRELFLTAGGAGGLHLWKYEYPIQRSKKDSEGIEMGVAGSVSLLQNVTLSTQPISSLDWSPDKRGLCVCSSFDQTVRVLIVTKLNKI

SEQ ID NO: 67848 - protein, 261 aa, Homo sapiens
RQKPEWTCLLKLLLFHFSGVTESSAPRLNSVPFGRMEADASVDMFSKVLEHQLLQTTKLVEEHLDSEIQKLDQMDEDELERLKEKRLQALRKAQQQKQEWLSKGHGEYREIPSERDFFQEVKESENVVCHFYRDSTFRCKILDRHLAILSKKHLETKFLKLNVEKAPFLCERLHIKVIPTLALLKDGKTQDYVVGFTDLGNTDDFTTETLEWRLGSSDILNYSGNLMEPPFQNQKKFGTNFTKLEKKTIRGKKYDSDSDDD

SEQ ID NO: 67849 - protein, 42 aa, Homo sapiens
LRMNTVNILSTMLEVLYLWLIMARTPMDLSSSSPMANSHIWT

SEQ ID NO: 67850 - protein, 43 aa, Homo sapiens
RLTEAASGRTFWLLTVLLWFSRIVCRCEINHEFRCSFDPREFC

SEQ ID NO: 67851 - protein, 158 aa, Homo sapiens
MWSSTWYYGVVTLVSILQYSNVYCPTPKVQDLVDDKSLQEACLSYVTKQGHKRASLRDVFQLYCSLSPGTTVRDLIGRHPQQLQHVDERKLIQFGLMKNLIRRLQKYPVRVTREEQSHPARLYTGCHSYDEICCKTGMSYHELDERLENDPNIIICWK

SEQ ID NO: 67852 - protein, 298 aa, Homo sapiens
LLLLLLSIHSALAMRICSFNVRSFGESKQEDKNAMDVIVKVIKRCDIILVMEIKDSNNRICPILMEKLNRNSRRGITYNYVISSRLGRNTYKEQYAFLYKEKLVSVKRSYHYHDYQDGDADVFSREPFVVWFQSPHTAVKDFVIIPLHTTPETSVKEIDELVEVYTDVKHRWKAENFIFMGDFNAGCSYVPKKAWKNIRLRTDPRFVWLIGDQEDTTVKKSTNCAYDRIVLRGQEIVSSVVPKSNSVFDFQKAYKLTEEEALDVSDHFPVEFKLQSSRAFTNSKKSVTLRKKTKSKRS

SEQ ID NO: 67853 - protein, 50 aa, Homo sapiens
IFSVASAALFCVHRMATDRHASFPTHWKAHRQGERGHRRCQHCRYSKDLK

SEQ ID NO: 67854 - protein, 816 aa, Homo sapiens
ILGNTMRLIRNIYIFCSIVMTAEGDAPELPEERELMTNCSNMSLRKVPADLTPATTTLDLSYNLLFQLQSSDFHSVSKLRVLILCHNRIQQLDLKTFEFNKELRYLDLSNNRLKSVTWYLLAGLRYLDLSFNDFDTMPICEEAGNMSHLEILGLSGAKIQKSDFQKIAHLHLNTVFLGFRTLPHYEEGSLPILNTTKLHIVLPMDTNFWVLLRDGIKTSKILEMTNIDGKSQFVSYEMQRNLSLENAKTSVLLLNKVDLLWDDLFLILQFVWHTSVEHFQIRNVTFGGKAYLDHNSFDYSNTVMRTIKLEHVHFRVFYIQQDKIYLLLTKMDIENLTISNAQMPHMLFPNYPTKFQYLNFANNILTDELFKRTIQLPHLKTLILNGNKLETLSLVSCFANNTPLEHLDLSQNLLQHKNDENCSWPETVVNMNLSYNKLSDSVFRCLPKSIQILDLNNNQIQTVPKETIHLMALRELNIAFNFLTDLPGCSHFSRLSVLNIEMNFILSPSLDFVQSCQEVKTLNAGRNPFRCTCELKNFIQLETYSEVMMVGWSDSYTCEYPLNLRGTRLKDVHLHELSCNTALLIVTIVVIMLVLGLAVAFCCLHFDLPWYLRMLGQCTQTWHRVRKTTQEQLKRNVRFHAFISYSEHDSLWVKNELIPNLEKEDGSILICLYESYFDPGKSISENIVSFIEKSYKSIFVLSPNFVQNEWCHYEFYFAHHNLFHENSDHIILILLEPIPFYCIPTRYHKLKALLEKKAYLEWPKDRRKCGLFWANLRAAINVNVLATREMYELQTFTELNEESRGSTISLMRTDCL

SEQ ID NO: 67855 - protein, 15 aa, Homo sapiens
KPFRVMPACLLMQLF

SEQ ID NO: 67856 - protein, 319 aa, Homo sapiens
VRALPWLPWLLWLLCRGGGDADSRAPFTPTWPRSREREAAAFRESLNRHRYLNSLFPSENSTAFYGINQFSYLFPEEFKAIYLRSKPSKFPRYSAEVHMSIPNVSLPLRFDWRDKQVVTQVRNQQMCGGCWAFSVVGAVESAYAIKGKPLEDLSVQQVIDCSYNNYGCNGGSTLNALNWLNKMQVKLVKDSEYPFKAQNGLCHYFSGSHSGFSIKGYSAYDFSDQEDEMAKALLTFGPLVVIVDAVSWQDYLGGIIQHHCSSGEANHAVLITGFDKTGSTPYWIVRNSWGSSWGVDGYAHVKMGSNVCGIADSVSSIFV

SEQ ID NO: 67857 - protein, 282 aa, Homo sapiens
MWACGVILYILLVGYPPFWDEDQHRLYQQIKAGAYDFPSPEWDTVTPEAKDLINKMLTINPAKRITASEALKHPWICQRSTVASMMHRQETVDCLKKFNARRKLKGAILTTMLATRNFSAAKSLLKKPDGVKESTESSNTTIEDEDVKARKQEIIKVTEQLIEAINNGDFEAYTKICDPGLTAFEPEALGNLVEGMDFHRFYFENALSKSNKPIHTIILNPHVHLVGDDAACIAYIRLTQYMDGSGMPKTMQSEETRVWHRRDGKWQNVHFHRSGSPTVPIN

SEQ ID NO: 67858 - protein, 538 aa, Homo sapiens
LATLLAAMLALLTQVALVVQVAEAARAPSVSAKPGPALWPLPLLVKMTPNLLHLAPENFYISHSPNSTAGPSCTLLEEAFRRYHGYIFGFYKWHHEPAEFQAKTQVQQLLVSITLQSECDAFPNISSDESYTLLVKEPVAVLKANRVWGALRGLETFSQLVYQDSYGTFTINESTIIDSPRFSHRGILIDTSRHYLPVKIILKTLDAMAFNKFNVLHWHIVDDQSFPYQSITFPELSNKGSYSLSHVYTPNDVRMVIEYARLRGIRVLPEFDTPGHTLSWGKGQKDLLTPCYSRQNKLDSFGPINPTLNTTYSFLTTFFKEISEVFPDQFIHLGGDEVEFKCWESNPKIQDFMRQKGFGTDFKKLESFYIQKVLDIIATINKGSIVWQEVFDDKAKLAPGTIVEVWKDSAYPEELSRVTASGFPVILSAPWYLDLISYGQDWRKYYKVEPLDFGGTQKQKQLFIGGEACLWGEYVDATNLTPRLWPRASAVGERLWSSKDVRDMDDAYDRLTRHRCRMVERGIAAQPLYAGYCNHENM

SEQ ID NO: 67859 - protein, 676 aa, Homo sapiens
LALALALALGPAATLAGPAKSPYQLVLQHSRLRGRQHGPNVCAVQKVIGTNRKYFTNCKQWYQRKICGKSTVISYECCPGYEKVPGEKGCPAALPLSNLYETLGVVGSTTTQLYTDRTEKLRPEMEGPGSFTIFAPSNEAWASLPAEVLDSLVSNVNIELLNALRYHMVGRRVLTDELKHGMTLTSMYQNSNIQIHHYPNGIVTVNCARLLKADHHATNGVVHLIDKVISTITNNIQQIIEIEDTFETLRAAVAASGLNTMLEGNGQYTLLAPTNEAFEKIPSETLNRILGDPEALRDLLNNHILKSAMCAEAIVAGLSVETLEGTTLEVGCSGDMLTINGKAIISNKDILATNGVIHYIDELLIPDSAKTLFELAAESDVSTAIDLFRQAGLGNHLSGSERLTLLAPLNSVFKDGTPPIDAHTRNLLRNHIIKDQLASKYLYHGQTLETLGGKKLRVFVYRNSLCIENSCIAAHDKRGRYGTLFTMDRVLTPPMGTVMDVLKGDNRFSMLVAAIQSAGLTETLNREGVYTVFAPTNEAFRALPPRERSRLLGDAKELANILKYHIGDEILVSGGIGALVRLKSLQGDKLEVSLKNNVVSVNKEPVAEPDIMATNGVVHVITNVLQPPANRPQERGDELADSALEIFKQASAFSRASQRSVRLAPVYQKLLERMKH

SEQ ID NO: 67860 - protein, 7 aa, Homo sapiens
VWLGILW

SEQ ID NO: 67861 - protein, 17 aa, Homo sapiens
MTLLVVHHLQVLMMLKL

SEQ ID NO: 67862 - protein, 62 aa, Homo sapiens
VIGIQLVVTMVMASVMQKIIPHYSLARWLLCNGSLRWYQHPTEEELRILAGKQQKGKTKKDR

SEQ ID NO: 67863 - protein, 32 aa, Homo sapiens
IERGEAFRSCLLSLLLAPNADCEPGDAVVHFL

SEQ ID NO: 67864 - protein, 82 aa, Homo sapiens
LPVEEPNPAKRLLFLLLTIVFCQILMAEEGVPAPLPPEDAPNAASLAPTPVSAVLEPFNLTSEPSDYALDLSTFLQQHPAAF

SEQ ID NO: 67865 - protein, 85 aa, Homo sapiens
VNRPQWTTSGVLMMMVILKVEIKLPFRETGMWEPPPPPRTTASPAATAACCPSARTCSRRTPRPPGPCREFILGTGIKNAVRLST

SEQ ID NO: 67866 - protein, 256 aa, Homo sapiens
IVCRRRFVMGPVRLGILLFLFLAVHEAWAGMLKEEDDDTERLPSKCEVCKLLSTELQAELSRTGRSREVLELGQVLDTGKRKRHVPYSVSETRLEEALENLCERILDYSVHAERKGSLRYAKGQSQTMATLKGLVQKGVKVDLGIPLELWDEPSVEVTYLKKQCETMLEEFEDIVGDWYFHHQEQPLQNFLCEGHVLPAAETACLQETWTGKEITDGEEKTEGEEEQEEEEEEEEEEGGDKMTKTGSHPKLDREDL

SEQ ID NO: 67867 - protein, 191 aa, Homo sapiens
LSHAGLASFLLNAVSWLCPCPGAPVGVRPSLAPLVNILQDAGLEAQVKPEPGEPLGVYCINAYNDTLTATLIQFVKHGGGLLIGGQAWYWASQHGPDKVLSRFPGNKVTSVAGVYFTDTYGDRDRFKVSKKVPKIPLHVRRIPWEHPPAEICTSATILSGRRKGKGSAASLATACIISSQRRSTGSGSFRA

SEQ ID NO: 67868 - protein, 25 aa, Homo sapiens
VVALFFCSLQCMYCCCSFFGSLPRL

SEQ ID NO: 67869 - protein, 722 aa, Homo sapiens
LPALLLQHVLLHLLLLPIAIPYAEGQRKRRNTIHEFKKSAKTTLIKIDPALKIKTKKVNTADQCANRCTRNKGLPFTCKAFVFDKARKQCLWFPFNSMSSGVKKEFGHEFDLYENKDYIRNCIIGKGRSYKGTVSITKSGIKCQPWSSMIPHEHSFLPSSYRGKDLQENYCRNPRGEEGGPWCFTSNPEVRYEVCDIPQCSEVECMTCNGESYRGLMDHTESGKICQRWDHQTPHRHKFLPERYPDKGFDDNYCRNPDGQPRPWCYTLDPHTRWEYCAIKTCADNTMNDTDVPLETTECIQGQGEGYRGTVNTIWNGIPCQRWDSQYPHEHDMTPENFKCKDLRENYCRNPDGSESPWCFTTDPNIRVGYCSQIPNCDMSHGQDCYRGNGKNYMGNLSQTRSGLTCSMWDKNMEDLHRHIFWEPDASKLNENYCRNPDDDAHGPWCYTGNPLIPWDYCPISRCEGDTTPTIVNLDHPVISCAKTKQLRVVNGIPTRTNIGWMVSLRYRNKHICGGSLIKESWVLTARQCFPSRDLKDYEAWLGIHDVHGRGDEKCKQVLNVSQLVYGPEGSDLVLMKLARPAVLDDFVSTIDLPNYGCTIPEKTSCSVYGWGYTGLINYDGLLRVAHLYIMGNEKCSQHHRGKVTLNESEICAGAEKIGSGPCEGDYGGPLVCEQHKMRMVLGVIVPGRGCAIPNRPGIFVRVAYYAKWIHKIILTYKVPQS

SEQ ID NO: 67870 - protein, 191 aa, Homo sapiens
LSHAGLAPFLLNAVSWLCPCPGAPVGVHPSLAPLVNILQDAGLEAQVKPEPGEPLGVYCINAYNDTLTATLIQFVKHGGGLLIGGQAWYWASQHGPDKVLSRFPGNKVTSVAGVYFTDTYGDRDRFKVSKKVPKIPLHVRRIPWEHPPAEICTSATILSGRRKGKGSAASLATACIISSQRRSTGSGSFRA

SEQ ID NO: 67871 - protein, 41 aa, Homo sapiens
RQSGRTAGWGRLLLSLFLLSSCPTGPTHLFFHPLSSCSAET

SEQ ID NO: 67872 - protein, 14 aa, Homo sapiens
REISGTLILFRFFI

SEQ ID NO: 67873 - protein, 28 aa, Homo sapiens
IKKLREPLVLTIILSLFVKLHNVRVSIS

SEQ ID NO: 67874 - protein, 36 aa, Homo sapiens
RGFECGFCLLNWMLNRLLALILGLRCACAQHRVCCW

SEQ ID NO: 67875 - protein, 299 aa, Homo sapiens
VFAVLIPLIGIVAAQLLKWETKNCSVSSTNANDITQSLTGKGNDSEEEMRFQEVFMEHMSNMEKRIQHILDMEANLMDTEHFQNFSMTTDQRFNDILLQLSTLFSSVQGHGNAIDEISKSLISLNTTLLDLQLNIENLNGKIQENTFKQQEEISKLEERVYNVSAEIMAMKEEQVHLEQEIKGEVKVLNNITNDLRLKDWEHSQTLRNITLIQGPPGPPGEKGDRGPTGESGPRGFPGPIGPPGLKGDRGAIGFPGSRGLPGYAGRPGNSGPKGQKGEKGSGNTLRPVQLTDHIRAGPS

SEQ ID NO: 67876 - protein, 286 aa, Homo sapiens
LWSCGKSSYQIQNMIFLLLMLSLELQLHQIAALFTVTVPKELYIIEHGSNVTLECNFDTGSHVNLGAITASLQKVENDTSPHRERATLLEEQLPLGKASFHIPQVQVRDEGQYQCIIIYGVAWDYKYLTLKVKASYRKINTHILKVPETDEVELTCQATGYPLAEVSWPNVSVPANTSHSRTPEGLYQVTSVLRLKPPPGRNFSCVFWNTHVRELTLASIDLQSQMEPRTHPTWLLHIFIPFCIIAFIFIATVIALRKQLCQKLYSSKDTTKRPVTTTKREVNSAI

SEQ ID NO: 67877 - protein, 69 aa, Homo sapiens
IAGGLMAIAWFIFTQEVLTPLFPRIAAWPVSEFFLIRDTSLIPNVLWFEYTVTRAEARNRQRKLGTKLQ

SEQ ID NO: 67878 - protein, 46 aa, Homo sapiens
LELLLLLLLLLLGLSLISERASKRARGEKGRECPPSTLRSWARSHS

SEQ ID NO: 67879 - protein, 37 aa, Homo sapiens
VSSSALFLLYFIHNSQRCWTRMGRPPVAMSPPRCSWG

SEQ ID NO: 67880 - protein, 40 aa, Homo sapiens
KHCQKTLSMGLCWMRVLLTQVYTSISGQQKRRMTQAWCIK

SEQ ID NO: 67881 - protein, 45 aa, Homo sapiens
LAGYALGVGLFLLLLQPLTDPKLYGSLPLCVLLERAGDSEAPLCS

SEQ ID NO: 67882 - protein, 434 aa, Homo sapiens
RGLRMKPSLLCRPLSCFLMLLPWPLATLTSTTLWQCPPGEEPDLDPGQGTLCRPCPPGTFSAAWGSSPCQPHARCSLWRRLEAQVGMATRDTLCGDCWPGWFGPWGVPRVPCQPCSWAPLGTHGCDEWGRRARRGVEVAAGASSGGETRQPGNGTRAGGPEETAAQYAVIAIVPVFCLMGLLGILVCNLLKRKGYHCTAHKEVGPGPGGGGSGINPAYRTEDANEDTIGVLVRLITEKKENAAALEELLKEYHSKQLVQTSHRPVSKLPPAPPNVPHICPHRHHLHTVQGLASLSGPCCSRCSQKKWPEVLLSPEAVAATTPVPSLLPNPTRVPKAGAKAGRQGEITILSVGRFRVARIPEQRTSSMVSEVKTITEAGPSWGDLPDSPQPGLPPEQQALLGSGGSRTKWLKPPAENKAEENRYVVRLSESNLVI

SEQ ID NO: 67883 - protein, 738 aa, Homo sapiens
RLLLLLLVGLTAPALALAGYIEALAANAGTGFAVAEPQIAMFCGKLNMHVNIQTGKWEPDPTGTKSCFETKEEVLQYCQEMYPELQITNVMEANQRVSIDNWCRRDKKQCKSRFVTPFKCLVGEFVSDVLLVPEKCQFFHKERMEVCENHQHWHTVVKEACLTQGMTLYSYGMLLPCGVDQFHGTEYVCCPQTKIIGSVSKEEEEEDEEEEEEEDEEEDYDVYKSEFPTEADLEDFTEAAVDEDDEDEEEGEEVVEDRDYYYDTFKGDDYNEENPTEPGSDGTMSDKEITHDVKAVCSQEAMTGPCRAVMPRWYFDLSKGKCVRFIYGGCGGNRNNFESEDYCMAVCKAMIPPTPLPTNDVDVYFETSADDNEHARFQKAKEQLEIRHRNRMDRVKKEWEEAELQAKNLPKAERQTLIQHFQAMVKALEKEAASEKQQLVETHLARVEAMLNDRRRMALENYLAALQSDPPRPHRILQALRRYVRAENKDRLHTIRHYQHVLAVDPEKAAQMKSQVMTHLHVIEERRNQSLSLLYKVPYVAQEIQEEIDELLQEQRADMDQFTASISETPVDVRVSSEESEEIPPFHPFHPFPALPENEGSGVGEQDGGLIGAEEKVINSKNKVDENMVIDETLDVKEMIFNAERVGGLEEERESVGPLREDFSLSSSALIGLLVIAVAIATVIVISLVMLRKRQYGTISHGIVEVDPMLTPEERHLNKMQNHGYENPTYKYLEQMQI

SEQ ID NO: 67884 - protein, 60 aa, Homo sapiens
INGGIAGLIGVTCVFPIDLAKTRLQNQQNGQRVYTSMSDCLIKTVRSEGYFGMYRGEELL

SEQ ID NO: 67885 - protein, 295 aa, Homo sapiens
LLLTITVTGVTVLVLVLKSMNSRRREPITLQDPEAKYPLPLIEKEKISHNTRRFRFGLPSPDHVLGLPVGNYVQLLAKIDNELVVRAYTPVSSDDDRGFVDLIIKIYFKNVHPQYPEGGKMTQYLENMKIGETIFFRGPRGRLFYHGPGNLGIRPDQTSEPKKTLADHLGMIAGGTGITPMLQLIRHITKDPSDRTRMSLIFANQTEEDILVRKELEEIARTHPDQFNLWYTLDRPPIGWKYSSGFVTADMIKEHLPPPAKSTLILVCGPPPLIQTAAHPNLEKLGYTQDMIFTY

SEQ ID NO: 67886 - protein, 425 aa, Homo sapiens
TASATLSDPAAAAMQPSSLLPLALCLLAAPASALVRIPLHKFTSIRRTMSEVGGSVEDLIAKGPVSKYSQAVPAVTEGPIPEVLKNYMDAQYYGEIGIGTPPQCFTVVFDTGSSNLWVPSIHCKLLDIACWIHHKYNSDKSSTYVKNGTSFDIHYGSGSLSGYLSQDTVSVPCQSASSASALGGVKVERQVFGEATKQPGITFIAAKFDGILGMAYPRISVNNVLPVFDNLMQQKLVDQNIFSFYLSRDPDAQPGGELMLGGTDSKYYKGSLSYLNVTRKAYWQVHLDQVEVASGLTLCKEGCEAIVDTGTSLMVGPVDEVRELQKAIGAVPLIQGEYMIPCEKVSTLPAITLKLGGKGYKLSPEDYTLKVSQAGKTLCLSGFMGMDIPPPSGPLWILGDVFIGRYYTVFDRDNNRVGFAEAARL

SEQ ID NO: 67887 - protein, 463 aa, Homo sapiens
LLLLLFWGVVSHSFPATLETQEQDVDLVQKYLEKYYNLKNDGRQVEKRRNSGPVVEKLKQMQEFFGLKVTGKPDAETLKVMKQPRCGVPDVAQFVLTEGNPRWEQTHLTYRIENYTPDLPRADVDHAIEKAFQLWSNVTPLTFTKVSEGQADIMISFVRGDHRDNSPFDGPGGNLAHAFQPGPGIGGDAHFDEDERWTNNFREYNLHRVAAHELGHSLGLSHSTDIGALMYPSYTFSGDVQLAQDDIDGIQAIYGRSQNPVQPIGPQTPKACDSKLTFDAITTIRGEVMFFKDRFYMRTNPFYPEVELNFISVFWPQLPNGLEAAYEFADRDEVRFFKGNKYWAVQGQNVLHGYPKDIYSSFGFPRTVKHIDAALSEENTGKTYFFVANKYWRYDEYKRSMDPGYPKMIAHDFPGIGHKVDAVFMKDGFFYFFHGTRQYKFDPKTKRILTLQKANSWFNCRKN

SEQ ID NO: 67888 - protein, 39 aa, Homo sapiens
MVVMTIIVAFILEAFVFRMNYSRKNQDSEGLCRDDALGI

SEQ ID NO: 67889 - protein, 281 aa, Homo sapiens
VALLRLLLLLLPPAIRGPGLGVAGVAGAAGAGLPESVIWAVNAGGEAHVDVHGIHFRKDPLEGRVGRASDYGMKLPILRSNPEDQILYQTERYNEETFGYEVPIKEEGDYVLVLKFAEVYFAQSQQKVFDVRLNGHVVVKDLDIFDRVGHSTAHDEIIPMSIRKGKLSVQGEVSTFTGKLYIEFVKGYYDNPKVCALYIMAGTVDDVPKLQPHPGLEKKEEEEEEEEYDEGSNLKKQTNKNRVQSGPRTPNPYASDNSSLMFPILVAFGVFIPTLFCLCRL

SEQ ID NO: 67890 - protein, 610 aa, Homo sapiens
LAMVGCAFVLFLFLLHRDVSSREEATEKPWLKSLVSRKDHVLDLMLEAMNNLRDSMPKLQIRAPEAQQTLFSINQSCLPGFYTPAELKPFWERPPQDPNAPGADGKAFQKSKWTPLETQEKEEGYKKHCFNAFASDRISLQRSLGPDTRPPECVDQKFRRCPPLATTSVIIVFHNEAWSTLLRTVYSVLHTTPAILLKEIILVDDASTEEHLKEKLEQYVKQLQVVRVVRQEERKGLITARLLGASVAQAEVLTFLDAHCECFHGWLEPLLARIAEDKTVVVSPDIVTIDLNTFEFAKPVQRGRVHSRGNFDWSLTFGWETLPPHEKQRRKDETYPIKSPTFAGGLFSISKSYFEHIGTYDNQMEIWGGENVEMSFRVWQCGGQLEIIPCSVVGHVFRTKSPHTFPKGTSVIARNQVRLAEVWMDSYKKIFYRRNLQAAKMAQEKSFGDISERLQLREQLHCHNFSWYLHNVYPEMFVPDLTPTFYGAIKNLGTNQCLDVGENNRGGKPLIMYSCHGLGGNQYFEYTTQRDLRHNIAKQLCLHVSKGALGLGSCHFTGKNSQVPKDEEWELAQDQLIRNSGSGTCLTSQDKKPAMAPCNPSDPHQLWLFV

SEQ ID NO: 67891 - protein, 81 aa, Homo sapiens
KGLRRADAAQAATLLQLAVLFGFPPAVWGHERASPPGVKEGIDRAARGRSAHATARAGVHPRLEVCAGPRARAGWELRVET

SEQ ID NO: 67892 - protein, 38 aa, Homo sapiens
ILPVTEHMRMQQLLGVTGFLWVLCEEYAFIPVSGRGEE

SEQ ID NO: 67893 - protein, 18 aa, Homo sapiens
MATGWAWLETLALGLCLL

SEQ ID NO: 67894 - protein, 59 aa, Homo sapiens
KWSPALQIRTVLLSIQALLSAPNPDDPLANDVAEQWKTNEAQAIETARAWTRLYAMNNI

SEQ ID NO: 67895 - protein, 27 aa, Homo sapiens
LVLSSLRVRRWLSWLRVLTVPCLEIPC

SEQ ID NO: 67896 - protein, 68 aa, Homo sapiens
IISRVRLVNVWHFATLLLLSGDSSSTRRDRRRKAAEPGEERNMGTRAKSRRRPSRPLFLYSGSGYIRE

SEQ ID NO: 67897 - protein, 16 aa, Homo sapiens
IELPFAFAFFTFAFST

SEQ ID NO: 67898 - protein, 17 aa, Homo sapiens
LKVAGFNLLMTLRLWSS

SEQ ID NO: 67899 - protein, 46 aa, Homo sapiens
MRGPASSFYLVALLRARWVTSSCTGATRENSARVLALVVSVQTGTV

SEQ ID NO: 67900 - protein, 405 aa, Homo sapiens
LGLLLGRMSGSSLPSALALSLLLVSGSLLPGPGAAQNAGFVKSPMSETKLTGDAFELYCDVVGSPTPEIQWWYAEVNRAESFRQLWDGARKRRVTVNTAYGSNGVSVLRITRLTLEDSGTYECRASNDPKRNDLRQNPSITWIRAQATISVLQKPRIVTSEEVIIRDSPVLPVTLQCNLTSSSHTLTYSYWTKNGVELSATRKNASNMEYRINKPRAEDSGEYHCVYHFVSAPKANATIEVKAAPDITGHKRSENKNEGQDATMYCKSVGYPHPDWIWRKKENGMPMDIVNTSGRFFIINKENYTELNIVNLQITEDPGEYECNATNAIGSASVVTVLRVRSHLAPLWPFLGILAEIIILVVIIVVYEKRKRPDEVPDDDEPAGPMKTNSTNNHKDKNLRQRNTN

SEQ ID NO: 67901 - protein, 343 aa, Homo sapiens
KSQAASAAMWATLPLLCAGAWLLGVPVCGAAELCVNSLEKFHFKSWMSKHRKTYSTEEYHHRLQTFASNWRKINAHNNGNHTFKMALNQFSDMSFAEIKHKYLWSEPQNCSATKSNYLRGTGPYPPSVDWRKKGNFVSPVKNQGACGSCWTFSTTGALESAIAIATGKMLSLAEQQLVDCAQDFNNHGCQGGLPSQAFEYILYNKGIMGEDTYPYQGKDGYCKFQPGKAIGFVKDVANITIYDEEAMVEAVALYNPVSFAFEVTQDFMMYRTGIYSSTSCHKTPDKVNHAVLAVGYGEKNGIPYWIVKNSWGPQWGMNGYFLIERGKNMCGLAACASYPIPLV

SEQ ID NO: 67902 - protein, 68 aa, Homo sapiens
LLLSAAFAAWVVTGAAAEEATATRTGVEAAQHEAAQARSIAHVGTVRAGPGGRKMQHGSSNGNRTAGC

SEQ ID NO: 67903 - protein, 67 aa, Homo sapiens
IWLLSGSRQQYLIALWRLLLLEIYISEGTHSTEEDINKQINDKERVAAAMENPNLREIVEQCVLEPD

SEQ ID NO: 67904 - protein, 73 aa, Homo sapiens
IVILIAIAALGALILGCWCYLRLQRISQSEDEESIVGDGETKEPFLLVQYSAKGPCVERKAKLMTPNGPEVHG

SEQ ID NO: 67905 - protein, 41 aa, Homo sapiens
LAPSRDALSFFLLFLLLPLFASPANAVGAARRSGAARDRAT

SEQ ID NO: 67906 - protein, 59 aa, Homo sapiens
KSIFSGRVPGSSSSFLLFLLLLHLRLLGDHCPLSAADTGCSSRLGLFTYAPHRSLGRPT

SEQ ID NO: 67907 - protein, 46 aa, Homo sapiens
TGGGGAAAAAATPLGALFFLTAAAAAGRGPGAEPGAPSSSGRERIH

SEQ ID NO: 67908 - protein, 23 aa, Homo sapiens
IWCWRWVSHLGLYEMLLGLHLKL

SEQ ID NO: 67909 - protein, 80 aa, Homo sapiens
KKYNHLNLFLFQGFRLVPFLVELRAVMDWVWTDTTLSLSSWMCVEDIYANIFIIKCSRETEKVPGPRAGAGTRARDMPSP

SEQ ID NO: 67910 - protein, 44 aa, Homo sapiens
LGFCSVRLVAFWCLRLLWPLLSLWRQMMLEIDFGFSWSWNLCNV

SEQ ID NO: 67911 - protein, 39 aa, Homo sapiens
TGLLLTVLVALTYIVALLYEEPFTAEIYRQKASGSHKRS

SEQ ID NO: 67912 - protein, 63 aa, Homo sapiens
MYLLLCFFSLSRLDHFICCLEKKRTFVSKEVSEMILDFLLRNFSAPTCSMGHLVWLQSKKVEE

SEQ ID NO: 67913 - protein, 511 aa, Homo sapiens
KMAGSRQRGLRARVRPLFCALLLSLGRFVRGDGVGGDPAVALPHRRFEYKYSFKGPHLVQSDGTVPFWAHAGNAIPSSDQIRVAPSLKSQRGSVWTKTKAAFENWEVEVTFRVTGRGRIGADGLAIWYAENQGLEGPVFGSADLWNGVGIFFDSFDNDGKKNNPAIVIIGNNGQIHYDHQNDGASQALASCQRDFRNKPYPVRAKITYYQNTLTVMINNGFTPDKNDYEFCAKVENMIIPAQGHFGISAATGGLADDHDVLSFLTFQLTEPGKEPPTPDKEISEKEKEKYQEEFEHFQQELDKKKEEFQKGHPDLQGQPAEEIFESVGDRELRQVFEGQNRIHLEIKQLNRQLDMILDEQRRYVSSLTEEISKRGAGMPGQHGQITQQELDTVVKTQHEILRQVNEMKNSMSETVRLVSGMQHPGSAGGVYETTQHFIDIKEHLHIVKRDIDNLVQRNMPSNEKPKCPELPPFPSCLSTVHFIIFVVVQTVLFIGYIMYRSQQEAAAKKFF

SEQ ID NO: 67914 - protein, 1131 aa, Homo sapiens
VMYYTLATLIRIWLQEPLVQDEGTKEEDKALACSPIQITAGRRRSLWYATHYPTDERKLLSMTQDDYKPSDGLLVTVNGNPVDYHTIHPSLPMENGPGKADLYSTPQYRWEPSDESSEKREEEEEEKEEFEEERSREEKRSIKVHAMVSVFQFIMKQSYICALIAMMAWSITYHSWLTFVLLIWSCTLWMIRNRRKYAMISSPFMVVYGNLLLILQYIWSFELPEIKKVPGFLEKKEPGELASKILFTITFWLLLRQHLTEQKALQEKEALLSEVKIGSQENEEKDEELQDIQVEGEPKEEEEEEAKEEKQERKKVEQEEAEEEDEQDIMKVLGNLVVAMFIKYWIYVCGGMFFFVSFEGKIVMYKIIYMVLFLFCVALYQVHYEWWRKILKYFWMSVVIYTMLVLIFIYTYQFENFPGLWQNMTGLKKEKLEDLGLKQFTVAELFTRIFIPTSFLLVCILHLHYFHDRFLELTDLKSIPSKEDNTIYSHAKVNGRVYLIINRLAHPEGSLPDLTMMHLTASLEKPEVRKLAEPGEEKLEGYSEKAQKGDLGKDSEESEEDGEEEEESEEEEETSDLRNKWHLVIDRLTVLFLKFLEYFHKLQVFMWWILELHIIKIVSSYIIWVSVKEVSLFNYVFLISWAFALPYAKLRRLASSVCTVWTCVIIVCKMLYQLQTIKPENFSVNCSLPNENQTNIPFNELNKSLLYSAPIDPTEWVGLRKSSPLLVYLRNNLLMLAILAFEVTIYRHQEYYRGRNNLTAPVSRTIFHDITRLHLDDGLINCAKYFINYFFYKFGLETCFLMSVNVIGQRMDFYAMIHACWLIAVLYRRRRKAIAEIWPKYCCFLACIITFQYFICIGIPPAPCRDYPWRFKGASFNDNIIKWLYFPDFIVRPNPVFLVYDFMLLLCASLQRQIFEDENKAAVRIMAGDNVEICMNLDAASFSQHNPVPDFIHCRSYLDMSKVIIFSYLFWFVLTIIFITGTTRISIFCMGYLVACFYFLLFGGDLLLKPIKSILRYWDWLIAYNVFVITMKNILSIGACGYIGTLVHNSCWLIQAFSLACTVKGYQMPAANSPCTLPSGEAGIIWDSICFAFLLLQRRVFMSYYFLHVVADIKASQILASRWLNFSRPQL

SEQ ID NO: 67915 - protein, 41 aa, Homo sapiens
LLIAWVVVGVSLQRRILTVKKQSGSRGPPLIPQGPDGGQRG

SEQ ID NO: 67916 - protein, 72 aa, Homo sapiens
LLLLVLAWLQPWLGKRCHPPTWARAGSAPAAGTLSWLSRRFGQELQQALLGPAGVQPGPCLVPQLSRAAAAG

SEQ ID NO: 67917 - protein, 54 aa, Homo sapiens
VYYGSLGLWLALVDGLVRSSPSLDQMFDAEILGFSTPPGRLSMMSFILNALTWS

SEQ ID NO: 67918 - protein, 339 aa, Homo sapiens
TALLAAWIAAVAATAGPEEAALPPEQSRVQPMTASNWTLVMEGEWMLKFYAPWCPSCQQTDSEWEAFAKNGEILQISVGKVDVIQEPGLSGRFFVTTLPAFFHAKDGIFRRYRGPGIFEDLQNYILEKKWQSVEPLTGWKSPASLTMSGMAGLFSISGKIWHLHNYFTVTLGIPAWCSYVFFVIATLVFGLFMGLVLVVISECFYVPLPRHLSERSEQNRRSEEAHRAEQLQDAEEEKDDSNEEENKDSLVDDEEEKEDLGDEDEAEEEEEEDNLAAGVDEERSEANDQGPPGEDGVTREEVEPEEAEEGISEQPCPADTEVVEDSLRQRKSQHADKGL

SEQ ID NO: 67919 - protein, 539 aa, Homo sapiens
LLFLLVLTVTEPLRPELRCNPGQFACRSGTIQCIPLPWQCDGWATCEDESDEANCPEVTGEVRPHHGKEAVDPRQGRARGGDPSHFHAVNVAQPVRFSSNLRKCPTGWHHYEGTASCYRVYLSGENYWDAAQTCQRLNGSLATFSTDQELRFVLAQEWDQPERSFGWKDQRKLWVGYQYVITGRNRSLEGRWEVAFKGSSEVFLPPDPIFASAMSENDNVFCAQLQCFHFPTLRHHDLHSWHAESCYEKSSFLCKRSQTCVDIKDNVVDEGFYFTPKGDDPCLSCTCHGGEPEMCVAALCERPQGCQQYRKDPKECCKFMCLDPDGNSLFDSMASGMRLVVSCISSFLILSLLLFMVHRLRQRRRERIESLIGANLHHFNLGRRIPGFDYGPDGFGTGLTPLHLSDDGEGGTFHFHDPPPPYTAYKYPDIGQPDDPPPPYEASIHPDSVFYDPADDDAFEPVEVSLPAPGDGGSEGALLRRLEQPLPTAGASLADLEDSADSSSALLVPPDPAQSGSTPAAEALPGGGRHSRSSLNTVV

SEQ ID NO: 67920 - protein, 178 aa, Homo sapiens
TKEARMLLAWVQAFLVSNMLLAEAYGSGGCFWDNGHLYREDQTSPAPGLRCLNWLDAQSGLASAPVSGAGNHSYCRNPDEDPRGPWCYVSGEAGVPEKRPCEDLRCPETTSQALPAFTTEIQEASEGPGADEVQVFAPANALPARSEAAAVQPVIGISQRVRMNSKEKKDLGTLGGRI

SEQ ID NO: 67921 - protein, 94 aa, Homo sapiens
LALVLVGLVSWRRRQRRLRGASSAEAPDGDKDAPEPLDKVIILSPGISDATAPAWPPPGEDPGTTPPGHSVPVPATELGSTELVTTKTAGPEQQ

SEQ ID NO: 67922 - protein, 67 aa, Homo sapiens
LGTLLALVCVFVICRRYLVMQRLFPRIPHMKDPIGDSFQNDKLVVWEAGKAGLEECLVTEVQVVQKT

SEQ ID NO: 67923 - protein, 188 aa, Homo sapiens
TLLIVFFTVWVFGGGTTAMLSCLHIRVGVDSDQEHLGVPENERRTTKAESAWLFRMWYNFDHNYLKPLLTHSGPPLTTTLPACCGPIARCLTSPQAYENQEQLKDDDSDLILNDGDISLTYGDSTVNTEPATSSAPRRFMGNSSEDALDRELAFGDHELVIRGTRLVLPMDDSEPPLNLLDNTRHGPA

SEQ ID NO: 67924 - protein, 43 aa, Homo sapiens
IGWLVHLSVWSVAVFLPDQMSRLVSEGQCEKKIVSELEKLLED

SEQ ID NO: 67925 - protein, 266 aa, Homo sapiens
LLPAMVAWRSAFLVCLAFSLATLVQRGSGDFDDFNLEDAVKETSSVKQPWDHTTTTTTNRPGTTRAPAKPPGSGLDLADALDDQDDGRRKPGIGGRERWNHVTTTTKRPVTTRAPANTLGNDFDLADALDDRNDRDDGRRKPIAGGGGFSDKDLEDIVGGGEYKPDKGKGDGRYGSNDDPGSGMVAEPGTIAGVASALAMALIGAVSSYISYQQKKFCFSIQQGLNADYVKGENLEAVVCEEPQVKYSTLHTQSAEPPPPPEPARI

SEQ ID NO: 67926 - protein, 128 aa, Homo sapiens
MTGQIPRLSKVNLFTLLSLWMELFPAEAQRQKSQKNEEGKHGPLGDNEERTRVSTDKRQVKRTGLVVVKNMKIVGLHCSSEDLHAGQIALIKHGSRLKNCDLYFSRKPCSACLKMIVNGLLEAAKMPR

SEQ ID NO: 67927 - protein, 655 aa, Homo sapiens
MGLLLLSVVVTSRPEAFQPHHRELLRLLNETLGEVGSPGLLFYSLRTLTTMAPYLSTEDVPLARMLVPKLIMAMQTLIPIDEAKACEALEALDELLESEVPVITPYLSEVLTFCLEVARNVALGNAIRIRILCCLTFLVKVKSKALLKNRLLPPLLHTLFPIVAAEPPPGQLDPEDQDSEEEELEIELMGETPKHFAVQVVDMLALHLPPEKLCPQLMPMLEEALRSESPYQRKAGLLVLAVLSDGAGDHIRQRLLPPLLQIVCKGLEDPSQVVRNAALFALGQFSENLQPHISSYSREVMPLLLAYLKSVPLGHTHHLAKACYALENFVENLGPKVQPYLPELMECMLQLLRNPSSPRAKELAVSALGAIATAAQASLLPYFPAIMEHLREFLLTGREDLQPVQIQSLETLGVLARAVGEPMRPLAEECCQLGLGLCDQVDDPDLRRCTYSLFAALSGLMGEGLAPHLEQITTLMLLSLRSTEGIVPQYDGSSSFLLFDDESDGEEEEELMDEDVEEEDDSEISGYSVENAFFDEKEDTCAAVGEISVNTSVAFLPYMESVFEEVFKLLECPHLNVRKAAHEALGQFCCALHKACQSCPSEPNTAGCPGPSRAILHAGSEQGAGTPGGDGRAGGPDRGAPQLWDPHTEAPWAPR

SEQ ID NO: 67928 - protein, 524 aa, Homo sapiens
MGVHVGAALGALWFCLTGALEVQVPEDPVVALVGTDATLCCSFSPEPGFSLAQLNLIWQLTDTKQLVHSFAEGQDQGSAYANRTALFPDLLAQGNASLRLQRVRVADEGSFTCFVSIRDFGSAAVSLQVAAPYSKPSMTLEPNKDLRPGDTVTITCSSYQGYPEAEVFWQDGQGVPLTGNVTTSQMANEQGLFDVHSILRVVLGANGTYSCLVRNPVLQQDAHSSVTITPQRSPTGAVEVQVPEDPVVALVGTDATLRCSFSPEPGFSLAQLNLIWQLTDTKQLVHSFTEGRDQGSAYANRTALFPDLLAQGNASLRLQRVRVADEGSFTCFVSIRDFGSAAVSLQVAAPYSKPSMTLEPNKDLRPGDTVTITCSSYRGYPEAEVFWQDGQGVPLTGNVTTSQMANEQGLFDVHSVLRVVLGANGTYSCLVRNPVLQQDAHGSVTITGQPMTFPPEALWVTVGLSVCLIALLVALAFVCWRKIKQSCEEENAGAEDQDGEGEGSKTALQPLKHSDSKEGKDTWA

SEQ ID NO: 67929 - protein, 140 aa, Homo sapiens
MVLLVLLVLLASLVPEAPLDPRAPAALLVPRVTAVNLVLLAAKETLVLRESLALLVFKDPLALLERKESEELEVNPDPLACPDPLASVVDLVAVVSLAQMVLLVPRVPLVNVVLLALLAPKDLLVKLVVPVKLVCLVPRV

SEQ ID NO: 67930 - protein, 146 aa, Homo sapiens
MGTPLRGSQAPGRIVLLLLVITPQWRWIPSKTPNVAPRSNQRCNPGGYLSGGVSLCASHSQPAALPNLGRLQKKLLQTRCKGRRMCPKAGDQTGGAFCMCDVSGGGGECVSGSGGGGESGRKTGTTSAMKDPRVLKCKLRVTNDLH

SEQ ID NO: 67931 - protein, 94 aa, Homo sapiens
MLPTLTAPTLALLLLPKISCLLTSTHPRTQGSRAHFPRAWRLDPGEFLHPLQDPHSSPLWSLDHRWRWPELTCWLWGHSSCWPRMRRGTREYKG

SEQ ID NO: 67932 - protein, 706 aa, Homo sapiens
MRTGWATPRRPAGLLMLLFWFFDLAEPSGRAANDPFTIVHGNTGKCIKPVYGWIVADDCDETEDKLWKWVSQHRLFHLHSQKCLGLDITKSVNELRMFSCDSSAMLWWKCEHHSLYGAARYRLALKDGHGTAISNASDVWKKGGSEESLCDQPYHEIYTRDGNSYGRPCEFPFLIDGTWHHDCILDEDHSGPWCATTLNYEYDRKWGICLKPENGCEDNWEKNEQFGSCYQFNTQTALSWKEAYVSCQNQGADLLSINSAAELTYLKEKEGIAKIFWIGLNQLYSARGWEWSDHKPLNFLNWDPDRPSAPTIGGSSCARMDAESGLWQSFSCEAQLPYVCRKPLNNTVELTDVWTYSDTRCDAGWLPNNGFCYLLVNESNSWDKAHAKCKAFSSDLISIHSLADVEVVVTKLHNEDIKEEVWIGLKNINIPTLFQWSDGTEVTLTYWDENEPNVPYNKTPNCVSYLGELGQWKVQSCEEKLKYVCKRKGEKLNDASSDKMCPPDEGWKRHGETCYKIYEDEVPFGTNCNLTITSRFEQEYLNDLMKKYDKSLRKYFWTGLRDVDSCGEYNWATVGGRRRAVTFSNWNFLEPASPGGCVAMSTGKSVGKWEVKDCRSFKALSICKKMSGPLGPEEASPKPDDPCPEGWQSFPASLSCYKVFHAERIVRKRNWEEAERFCQALGAHLSSFSHVDEIKEFLHFLTDQFR

SEQ ID NO: 67933 - protein, 60 aa, Homo sapiens
MPPPRVFKSFLSLLFQGLSVLLSLAGDVLVSMYRSEEGTLAPQEQLFGGGGEQGRNLAGA

SEQ ID NO: 67934 - protein, 45 aa, Homo sapiens
MTLLLLLKSPYLAFLKFQGSLCATYHSPLTLVPSGPIVDGCMGAM

SEQ ID NO: 67935 - protein, 122 aa, Homo sapiens
MEDFKCPIFLGCIICVTGLCGLDRKEVQQLTVKHGGQYMGQLKMNECTHLIVQEPKGQKYECAKRWNVHCVTTQWFFDSIEKGFCQDESIYKTEPRPEAKTMPNSSTPTSQINTIDNISLRF

SEQ ID NO: 67936 - protein, 69 aa, Homo sapiens
MVCGWYFVWHLFLSKFKFLRELVGDTGSQEGDHEPSGSETEEDTSSSPHRIRSARQRRAPADEGHRPLT

SEQ ID NO: 67937 - protein, 209 aa, Homo sapiens
MAPRTLLLLLLGALALTETWAGSHSLRYFSTAVSQPGRGEPRFIAVGYVDDTEFVRFDSDSVSPRMERRAPWVEQEGLEYWDQETRNAKGHAQIYRVNLRTLLRYYNQSEAGFSHHPEEAWLRRGPDRRLLRRYEQFAYDGKDYIALNEDLHSWTAANTAAQISQHKWEADKYSEQVRAYLRASAWSGSADTWRTGRRRCSTRIPQRHM

SEQ ID NO: 67938 - protein, 24 aa, Homo sapiens
MAPRTLLLLLLGALALTETWAATP

SEQ ID NO: 67939 - protein, 164 aa, Homo sapiens
MAPRTLLLLLLGALALTETWAGECGVGRERASAGRSEWPARPGEPRREEGRAGLSLSSPPGSHSLRYFSTAVSQPGRGEPRFIAVGYVDDTEFVRFDSDSVSPRMERRAPWVEQEGLEYWDQETRNAKGHAQIYRVNLRTLLRYYNQSEAGMNSSPTMARITSP

SEQ ID NO: 67940 - protein, 13 aa, Homo sapiens
MVTMIIAVCILYA

SEQ ID NO: 67941 - protein, 545 aa, Homo sapiens
VCLPTVSLWILFVYIEAAIRFKDLKNFHVDLCRPFAAHCIGYPVVTLGFGFKSYVSYKMRLRKQKEVQKENEFYMQLLQQALPPEQQMLQKQEKEAEEAAKGLPDMDSSILIHHNGGIPANKKLSTTLPEIEYREKGKEKDKDAKKHNLGINNNNILQPVDSKIQEIEYMENHINSKRLNNDLVGSTENLLKEDSCTASSKNYKNASGVVNSSPRSHSATNGSIPSSSSKNEKKQKCTSKSPSTHKDLMENCIPNNQLSKPDALVRLEQDIKKLKADLQASRQVEQELRSQISSLSSTERGIRSEMGQLRQENELLQNKLHNAVQMKQKDKQNISQLEKKLKAEQEARSFVEKQLMEEKKRKKLEEATAARAVAFAAASRGECTETLRNRIRELEAEGKKLTMDMKVKEDQIRELELKVQELRKYKENEKDTEVLMSALSAMQDKTQHLENSLSAETRIKLDLFSALGDAKRQLEIAQGQILQKDQEIKDLKQKIAEVMAVMPSITYSAATSPLSPVSPHYSSKFVETSPSGLDPNASVYQPLKK

SEQ ID NO: 67942 - protein, 40 aa, Homo sapiens
LWNMLKVYRKKMVLLLEIFGVMSDLVHSTQNTNIKMYWFC

SEQ ID NO: 67943 - protein, 223 aa, Homo sapiens
KIRTRAISAKGMTLVTPLQLLLFASKKVQSDGQIVLVDDWIKLQISHEAAACITGLRAAMEALVVEVTKQPAIISQLDPVNERMLNMIRQISRPSAAGINLMIGSTRYGDGPRPPKMARYDNGSGYRRGGSSYSGGGYGGGYSSGGYGSGGYGGSANSFRAGYGAGVGGGYRGVSRGGFRGNSGGDYRGPSGGYRGSGGFQRGGGRGAYGTGYFGQGRGGGGY

SEQ ID NO: 67944 - protein, 12 aa, Homo sapiens
ISCSNFVLYMAL

SEQ ID NO: 67945 - protein, 13 aa, Homo sapiens
LKTCGVNLVVMVL

SEQ ID NO: 67946 - protein, 18 aa, Homo sapiens
MTFYKMAVIICLHLMHVF

SEQ ID NO: 67947 - protein, 219 aa, Homo sapiens [sequence omitted]

SEQ ID NO: 67948 - protein, 185 aa, Homo sapiens
KLLSLVAVVGCLLVPPAEANKVRESSEDIRCKCICPPYRNISGHIYNQNVSQKDCNCLHVVEPMPVPGHDVEAYCLLCECRYEERSTTTIKVIIVIYLSVVGALLLYMAFLMLVDPLIRKPDAYTEQLHNEEENEDARSMAAAAASLGGPRANTVLERVEGAQQRWKLQVQEQRKTVFDRHKMLS

SEQ ID NO: 67949 - protein, 51 aa, Homo sapiens
LGVPLGLVWGRSASLVVLAVTGSSSSKDKGPDSRSSTLATPLLPLLAPDGQ

SEQ ID NO: 67950 - protein, 54 aa, Homo sapiens
ICLLTTIYIFLIVPETKAKTFIEINQIFTKMNKVSEVYPEKEELKELPPVTSEQ

SEQ ID NO: 67951 - protein, 830 aa, Homo sapiens
KVHMHTKFCLICLLTFIFHHCNHCHEEHDHGPEALHRQHRGMTELEPSKFSKQAAENEKKYYIEKLFERYGENGRLSFFGLEKLLTNLGLGERKVVEINHEDLGHDHVSHLDILAVQEGKHFHSHNHQHSHNHLNSENQTVTSVSTKRNHKCDPEKETVEVSVKSDDKHMHDHNHRLRHHHRLHHHLDHNNTHHFHNDSITPSERGEPSNEPSTETNKTQEQSDVKLPKGKRKKKGRKSNENSEVITPGFPPNHDQGEQYEHNRVHKPDRVHNPGHSHVHLPERNGHDPGRGHQDLDPDNEGELRHTRKREAPHVKNNAIISLRKDLNEDDHHHECLNVTQLLKYYGHGANSPISTDLFTYLCPALLYQIDSRLCIEHFDKLLVEDINKDKNLVPEDEANIGASAWICGIISITVISLLSLLGVILVPIINQGCFKFLLTFLVALAVGTMSGDALLHLLPHSQGGHDHSHQHAHGHGHSHGHESNKFLEEYDAVLKGLVALGGIYLLFIIEHCIRMFKHYKQQRGKQKWFMKQNTEESTIGRKLSDHKLNNTPDSDWLQLKPLAGTDDSVVSEDRLNETELTDLEGQQESPPKNYLCIEEEKIIDHSHSDGLHTIHEHDLHAAAHNHHGENKTVLRKHNHQWHHKHSHHSHGPCHSGSDLKETGIANIAWMVIMGDGIHNFSDGLAIGAAFSAGLTGGISTSIAVFCHELPHELGDFAVLLKAGMTVKQAIVYNLLSAMMAYIGMLIGTAVGQYANNITLWIFAVTAGMFLYVALVDMLPEMLHGDGDNEEHGFCPVGQFILQNLGLLFGFAIMLVIALYEDKIVFDIQF

SEQ ID NO: 67952 - protein, 18 aa, Homo sapiens
TYHSAEARGNLAYWLWLL

SEQ ID NO: 67953 - protein, 567 aa, Homo sapiens
VAGGAAGPAMELRARGWWLLCAAAALVACARGDPASKSRSCGEVRQIYGAKGFSLSDVPQAEISGEHLRICPQGYTCCTSEMEENLANRSHAELETALRDSSRVLQAMLATQLRSFDDHFQHLLNDSERTLQATFPGAFGELYTQNARAFRDLYSELRLYYRGANLHLEETLAEFWARLLERLFKQLHPQLLLPDDYLDCLGKQAEALRPFGEAPRELRLRATRAFVAARSFVQGLGVASDVVRKVAQVPLGPECSRAVMKLVYCAHCLGVPGARPCPDYCRNVLKGCLANQADLDAEWRNLLDSMVLITDKFWGTSGVESVIGSVHTWLAEAINALQDNRDTLTAKVIQGCGNPKVNPQGPGPEEKRRRGKLAPRERPPSGTLEKLVSEAKAQLRDVQDFWISLPGTLCSEKMALSTASDDRCWNGMARGRYLPEVMGDGLANQINNPEVEVDITKPDMTIRQQIMQLKIMTNRLRSAYNGNDVDFQDASDDGSGSGSGDGCLDDLCSRKVSRKSSSSRTPLTHALPGLSEQEGQKTSAASCPQPPTFLLPLLLFLALTVARPRWR

SEQ ID NO: 67954 - protein, 78 aa, Homo sapiens
TFYSSWYYCLHILGILVLLLLPVKKTQRRKNTHENIQLSQSKKFDEGENSLGQNSFSTTNNVCNQNQEIASRHSSLKQ

SEQ ID NO: 67955 - protein, 399 aa, Homo sapiens
LGIALLAYVASVWGNFVNMRSIQENGELKIESKIEEMVEPLREKIRDLEKSFTQKYPPVKFLSEKDRKRILITGGAGFVGSHLTDKLMMDGHEVTVVDNFFTGRKRNVEHWIGHENFELINHDVVEPLYIEVDQIYHLASPASPPNYMYNPIKTLKTNTIGTLNMLGLAKRVGARLLLASTSEVYGDPEVHPQSEDYWGHVNPIGPRACYDEGKRVAETMCYAYMKQEGVEVRVARIFNTFGPRMHMNDGRVVSNFILQALQGEPLTVYGSGSQTRAFQYVSDLVNGLVALMNSNVSSPVNLGNPEEHTILEFAQLIKNLVGSGSEIQFLSEAQDDPQKRKPDIKKAKLMLGWEPVVPLEEGLNKAIHYFRKELEYQANNQYIPKPKPARIKKGRTRHS

SEQ ID NO: 67956 - protein, 40 aa, Homo sapiens
LAFYVFMVFLATLGLWDVFFGFEENKCSMSYMFEYPEYQR

SEQ ID NO: 67957 - protein, 39 aa, Homo sapiens
IVGVQLFPFRLAAAISLISQVSQDGCIQVHPGAMEKEAV

SEQ ID NO: 67958 - protein, 97 aa, Homo sapiens
RTFYVALLLWPMCCILCPQCATGPQRNVCLSNHGSGAVWQECKSGWRPGSPPGALHPPSRRTQQHDALRRSHCVQAPHLPGTALLRVPPSRNEGVHP

SEQ ID NO: 67959 - protein, 17 aa, Homo sapiens
VPRSGIALRLLGAAASL

SEQ ID NO: 67960 - protein, 22 aa, Homo sapiens
RVVVLFLVFSSRSPLPVWTSKV

SEQ ID NO: 67961 - protein, 51 aa, Homo sapiens
VPYRQSPAARSRDALFLLWVLIMETKRVEIPGSVLDDLCRICEDYFMKTRK

SEQ ID NO: 67962 - protein, 29 aa, Homo sapiens
VLHLASLQLGLLLNGVCSLAEELRHIHSR

SEQ ID NO: 67963 - protein, 24 aa, Homo sapiens
REEAQLVMLLLLLLPPPPPLLLIL

SEQ ID NO: 67964 - protein, 454 aa, Homo sapiens
IMKLLVILLFSGLITGFRSDSSSSLPPKLLLVSFDGFRADYLKNYEFPHLQNFIKEGVLVEHVKNVFITKTFPNHYSIVTGLYEESHGIVANSMYDAVTKKHFSDSNDKDPFWWNEAVPIWVTNQLQENRSSAAAMWPGTDVPIHDTISSYFMNYNSSVSFEERLNNITMWLNNSNPPVTFATLYWEEPDASGHKYGPEDKENMSRVLKKIDDLIGDLVQRLKMLGLWENLNVIITSDHGMTQCSQDRLINLDSCIDHSYYTLIDLSPVAAILPKINRTEVYNKLKNCSPHMNVYLKEDIPNRFYYQHNDRIQPIILVADEGWTIVLNESSQKLGDHGYDNSLPSMHPFLAAHGPAFHKGYKHSTINIVDIYPMMCHILGLKPHPNNGTFGHTKCLLVDQWCINLPEAIAIVIGSLLVLTMLTCLIIIMQNRLSVPRPFSRLQLQEDDDDPLIG

SEQ ID NO: 67965 - protein, 297 aa, Homo sapiens
VSRASPLLLLLLVPSPRLAAAAPRRQLGDWERSRLGYAAPPAGRSSAWRCSPGVAAAAGALPQYHGPAPALVSCRRELSLSAGSLQLERKRRDFTSSGSRKLYFDTHALVCLLEDNGFATQQAEIIVSALVKILEANMDIVYKDMVTKMQQEITFQQVMSQIANVKKDMIILEKSEFSALRAENEKIKLELHQLKQQVMDEVIKVRTDTKLDFNLEKSRVKELYSLNEKKLLELRTEIVALHAQQDRALTQTDRKIETEVAGLKTMLESHKLDNIKYLAGSIFTCLTVALGFYRLWI

SEQ ID NO: 67966 - protein, 282 aa, Homo sapiens
LLVFLGILWVKMGKPSAPQEAEDNMKLLPVDCERKTDEFCQAKQKAALLELLHELYNFLAIQAGNFECGNPENLKSKCIPVMEAQEYIANVTSSSSAKFEAALTWILSSNKDVGIWLKGEDQSELVTTVDKVVCLESAHPRMGVGCRLSRALLTAVTNVLIFFWCLAFLWGLLILLKYRWRKLEEEEQAMYEMVKKIIDVVQDHYVDWEQDMERYPYVGILHVRDSLIPPQSRRRMKRVWDRAVEFLASNESRIQTESHRVAGEDMLVWRWTKPSSFSDSER

SEQ ID NO: 67967 - protein, 29 aa, Homo sapiens
LVQANKVFLSLIFFLLVLTGEINSPGPPG

SEQ ID NO: 67968 - protein, 32 aa, Homo sapiens
LGSAQALLILLLIAMAVFPLRAERAESKLESC

SEQ ID NO: 67969 - protein, 316 aa, Homo sapiens
IMDLRQFLMCLSLCTAFALSKPTEKKDRVHHEPQLSDKVHNDAQSFDYDHDAFLGAEEAKTFDQLTPEESKERLGMIVDKIDADKDGFVTEGELKSWIKHAQKKYIYDNVENQWQEFDMNQDGLISWDEYRNVTYGTYLDDPDPDDGFNYKQMMVRDERRFKMADKDGDLIATKEEFTAFLHPEEYDYMKDIVVQETMEDIDKNADGFIDLEEYIGDMYSHDGNTDEPEWVKTEREQFVEFRDKNRDGKMDKEETKDWILPSDYDHAEAEARHLVYESDQNKDGKLTKEEIVDKYDLFVGSQATDFGEALVRHDEF

SEQ ID NO: 67970 - protein, 172 aa, Homo sapiens
IVFAILAAMSIQGSANLQTQWNIVGEFSNLPQEELIEWIKYSTKPDAVFAGAMPTMASVKLSALRPIVNHPHYEDAGLRARTKIVYSMYSRKAAEEVKRELIKLKVNYYILEESWCVRRSKPGCSMPEIWDVEDPANAGKTPLCNLLVKDSKPHFTTVFQNSVYKVLEVVKE

SEQ ID NO: 67971 - protein, 30 aa, Homo sapiens
MTLPFYLIYLVLSPHSPLSTWIFREKNEKE

SEQ ID NO: 67972 - protein, 561 aa, Homo sapiens
LHFYLWWLCYGGAEMRQKRKGDLSPAELMMLTIGDVIKQLIEAHEQGKDIDLNKVKTKTAAKYGLSAQPRLVDIIAAVPPQYRKVLMPKLKAKPIRTASGIAVVAVMCKPHRCPHISFTGNICVYCPGGPDSDFEYSTQSYTGYEPTSMRAIRARYDPFLQTRHRIEQLKQLGHSVDKVEFIVMGGTFMALPEEYRDYFIRNLHDALSGHTSNNIYEAVKYSERSLTKCIGITIETRPDYCMKRHLSDMLTYGCTRLEIGVQSVYEDVARDTNRGHTVKAVCESFHLAKDSGFKVVAHMMPDLPNVGLERDIEQFTEFFENPAFRPDGLKLYPTLVIRGTGLYELWKSGRYKSYSPSDLVELVARILALVPPWTRVYRVQRDIPMPLVSSGVEHGNLRELALARMKDLGIQCRDVRTREVGIQEIHHKVRPYQVELVRRDYVANGGWETFLSYEDPDQDILIGLLRLRKCSEETFRFELGGGVSIVRELHVYGSVVPVSSRDPTKFQHQGFGMLLMEEAERIAREEHGSGKIAVISGVGTRNYYRKIGYRLQGPYMVKMLK

SEQ ID NO: 67973 - protein, 312 aa, Homo sapiens
VPTSRCRFLLARVLGYLVVMEAVLTEELDEEEQLLRRHRKEKKELQAKIQGMKNAVPKNDKKRRKQLTEDVAKLEKEMEQKHREELEQLKLTTKENKIDSVAVNISNLVLENQPPRISKAQKRREKKAALEKEREERIAEAEIENLTGARHMESEKLAQILAARQLEIKQIPSDGHCMYKAIEDQLKEKDCALTVVALRSQTAEYMQSHVEDFLPFLTNPNTGDMYTPEEFQKYCEDIVNTAAWGGQLELRALSHILQTPIEIIQADSPPIIVGEEYSKKPLILVYMRHAYGLGEHYNSVTRLVNIVTENCS

SEQ ID NO: 67974 - protein, 595 aa, Homo sapiens
LSYVAGIAWFLALVFPPLTQRTYMSENAMGSTMVEEQFAGGDRARAFARDFAAHRKKSGALPVAWLERTMRSVGLEVYTQSFSRKLPFPDETHERYMVSGTNVYGILRAPRAASTESLVLTVPCGSDSTNSQAVGLLLALAAHFRGQIYWAKDIVFLVTEHDLLGTEAWLEAYHDVNVTGMQSSPLQGRAGAIQAAVALELSSDVVTSLDVAVEGLNGQLPNLDLLNLFQTFCQKGGLLCTLQGKLQPEDWTSLDGPLQGLQTLLLMVLRQASGRPHGSHGLFLRYRVEALTLRGINSFRQYKYDLVAVGKALEGMFRKLNHLLERLHQSFFLYLLPGLSRFVSIGLYMPAVGFLLLVLGLKALELWMQLHEAGMGLEEPGGAPGPSVPLPPSQGVGLASLVAPLLISQAMGLALYVLPVLGQHVATQHFPVAEAEAVVLTLLAIYAAGLALPHNTHRVVSTQAPDRGWMALKLVALIYLALQLGCIALTNFSLGFLLATTMVPTAALAKPHGPRTLYAALLVLTSPAATLLGSLFLWRELQEAPLSLAEGWQLFLAALAQGVLEHHTYGALLFPLLSLGLYPCWLLFWNVLFWK

SEQ ID NO: 67975 - protein, 29 aa, Homo sapiens
RGKRVVFLKQLASGLLLVTGPLVLSRIPL

SEQ ID NO: 67976 - protein, 81 aa, Homo sapiens
IFMGLSVTLMMSHLRQETNSKHQLKLVYLLASPCLIVCRLSEKYSMTSLWKRKPLSGLKRLRKSKKPSGKQSAKLRKQKLK

SEQ ID NO: 67977 - protein, 90 aa, Homo sapiens
VALVLMLLRSQRLGQQPLPRRPGHDDGQRPSGGAAAAPRRGAQLRRPRHSHPTRARRCPGGLPGHAGGAAPGRGAAGRARCLGPSARGPG

SEQ ID NO: 67978 - protein, 27 aa, Homo sapiens
LKIPQLYQSGVAVLVLTVLSSVGPAAI

SEQ ID NO: 67979 - protein, 53 aa, Homo sapiens
LSGCFLIFMVPVACGLFPQKCELPVSYLEPKLQDTIKAKYGELEPYVYFNKGL

SEQ ID NO: 67980 - protein, 231 aa, Homo sapiens
RAALWTLGLGPLLLNLWAVPIGGPGALRLAYRHSTCDGVVLVRHHGAWGYVCNQEWTLAEASVVCRQLGCGPAVGAPKYVPLPGEMAQPWLHNVSCRGNESSLWECSLGSWCQSPCPHAWVVVALCSNGTFRELRLVKGRSPCAGLPEIRNVNGVDRLCVLHVEEAMVFCRELGCGPVLQAPRRDVGVVRKYLACRGTEPTIRSCRLDNNFRSGCDLRLDAEVVCSGEAAT

SEQ ID NO: 67981 - protein, 110 aa, Homo sapiens
LGLMAFLILPRVTQAMQRGLGRSEVSPGEAIYDVIGEMPPAGLYEEIMEAEAVLQDEEDGSVVKVDTEAAVSGEVSNLLEGQSIRAEGGHSRPVSQGYDEAAFPLEEMTL

SEQ ID NO: 67982 - protein, 19 aa, Homo sapiens
VRVDMIGRRIVVLFSSLAV

SEQ ID NO: 67983 - protein, 468 aa, Homo sapiens
VLVLLGVLSVCAASGHGSVAEREAGGEAEWAEPWDGAVFRPPSALGAVGVTRSSGTPRPGREEAGDLPVLLWWSPGLFPHFPGDSERIECARGACVASRNRRALRDSRTRALLFYGTDFRASAAPLPRLAHQSWALLHEESPLNNFLLSHGPGIRLFNLTSTFSRHSDYPLSLQWLPGTAYLRRPVPPPMERAEWRRRGYAPLLYLQSHCDVPADRDRYVRELMRHIPVDSYGKCLQNRELPTARLQDTATATTEDPELLAFLSRYKFHLALENAICNDYMTEKLWRPMHLGAVPVYRGSPSVRDWMPNNHSVILIDDFESPQKLAEFIDFLDKNDEEYMKYLAYKQPGGITNQFLLDSLKHREWGVNDPLLPNYLNGFECFVCDYELARLDAEKAHAASPGDSPVFEPHIAQPSHMDCPVPTPGFGNVEEIPENDSSLVQVRDHCICLRFLWPHSEKGRTHNYAAVP

SEQ ID NO: 67984 - protein, 15 aa, Homo sapiens
IWEARTPATVALLLG

SEQ ID NO: 67985 - protein, 462 aa, Homo sapiens
IYGASAGALTATALVTGVCLGEAGAKFIEVSKEARKRFLGPLHPSFNLVKIIRSFLLKVLPADSHEHASGRLGISLTRVSDGENVIISHFNSKDELIQANVCSGFIPVYCGLIPPSLQGVRYVDGGISDNLPLYELKNTITVSPFSGESDICPQDSSTNIHELRVTNTSIQFNLRNLYRLSKALFPPEPLVLREMCKQGYRDGLRFLQRNGLLNRPNPLLALPPARPHGPEDKDQAVESAQAEDYSQLPGEDHILEHLPARLNEALLEACVEPTDLLTTLSNMLPVRLATAMMVPYTLPLESALSFTIRLLEWLPDVPEDIRWMKEQTGSICQYLVMRAKRKLGRHLPSRLPEQVELRRVQSLPSVPLSCAAYREALPGWMRNNLSLGDALAKWEECQRQLLLGLFCTNVAFPPEALRMRAPADPAPAPADPASPQHQLAGPAPLLSTPAPEARPVIGALGL

SEQ ID NO: 67986 - protein, 783 aa, Homo sapiens
LWLLWGLLLHQGQSLSHSHSEKATGTSSGANSEESTAAEFCRIDKPLCHSEDEKLSFEAVRNIHKLMDDDANGDVDVEESDEFLREDLNYHDPTVKHSTFHGEDKLISVEDLWKAWKSSEVYNWTVDEVVQWLITYVELPQYEETFRKLQLSGHAMPRLAVTNTTMTGTVLKMTDRSHRQKLQLKALDTVLFGPPLLTRHNHLKDFMLVVSIVIGVGGCWFAYIQNRYSKEHMKKMMKDLEGLHRAEQSLHDLQERLHKAQEEHRTVEVEKVHLEKKLRDEINLAKQEAQRLKELREGTENERSRQKYAEEELEQVREALRKAEKELESHSSWYAPEALQKWLQLTHEVEVQYYNIKKQNAEKQLLVAKEGAEKIKKKRNTLFGTFHVAHSSSLDDVDHKILTAKQALSEVTAALRERLHRWQQIEILCGFQIVNNPGIHSLVAALNIDPSWMGSTRPNPAHFIMTDDVDDMDEEIVSPLSMQSPSLQSSVRQRLTEPQHGLGSQRLVEGEAGHFLTSRVSLRRMRSLSSGQSFSSEGYGTSSPSASAAASCSSSITTITTTTTTTTTFTTVHVHPVYYHHSTSYFLQMEPYPDTPPSDSTAVMPGHSESLGDLTHSDSESSLHMSDRQRVAPKPPQMSRAADEALNAMTSNGSHRLIEGVHPGSLVEKLPDSPALAKKALLALNHGLDKAHSLMELSPSAPPGGSPHLDSSRSHSPSSPDPDTPSPVGDSRALQASRNTRIPHLAGKKAVAEEDNGSIGEETDSSPGRKKFPLKIFKKPLKK

SEQ ID NO: 67987 - protein, 32 aa, Homo sapiens
IVTLIMLSRGPVWLLLWRQGRQLIPEGIWCFL

SEQ ID NO: 67988 - protein, 313 aa, Homo sapiens
LLFAILLYLPPLFWRFAAAPHICSDLKFIMEELDKVYNRAIKAAKSARDLDMRDGACSVPGVTENLGQSLWEVSESHFKYPIVEQYLKTKKNSNNLIIKYISCRLLTLIIILLACIYLGYYFSLSSLSDEFVCSIKSGILRNDSTVPDQFQCKLIAVGIFQLLSVINLVVYVLLAPVVVYTLFVPFRQKTDVLKVYEILPTFDVLHFKSEGYNDLSLYNLFLEENISEVKSYKCLKVLENIKSSGQGIDPMLLLTNLGMIKMDVVDGKTPMSAEMREEQGNQTAELQGMNIDSETKANNGEKNARQRLLDSSC

SEQ ID NO: 67989 - protein, 122 aa, Homo sapiens
IFGAGAATAAAILCLWRKKLLWRLEVDGDHPRDGGVSYPRFPLCRPPSPLRGQHVVKPEPRESRGEEEESEGRRGIQSGFSFSCSGPRRGAAAQCQSRRRPRPVLRGPGRTPVGIISHRSKT

SEQ ID NO: 67990 - protein, 56 aa, Homo sapiens
IAGLIGVTCVFPIDLAKTRLQNQQNGQRVYTSMSDCLIKTVRSEGYFGMYRGEELL

SEQ ID NO: 67991 - protein, 472 aa, Homo sapiens
ILLLLCVAVCSAYPLDGAARGEDTSMNLVQKYLENYYDLKKDVKQFVRRKDSGPVVKKIREMQKFLGLEVTGKLDSDTLEVMRKPRCGVPDVGHFRTFPGIPKWRKTHLTYRIVNYTPDLPKDAVDSAVEKALKVWEEVTPLTFSRLYEGEADIMISFAVREHGDFYPFDGPGNVLAHAYAPGPGINGDAHFDDDEQWTKDTTGTNLFLVAAHEIGHSLGLFHSANTEALMYPLYHSLTDLTRFRLSQDDINGIQSLYGPPPDSPETPLVPTEPVPPEPGTPANCDPALSFDAVSTLRGEILIFKDRHFWRKSLRKLEPELHLISSFWPSLPSGVDAAYEVTSKDLVFIFKGNQFWAIRGNEVRAGYPRGIHTLGFPPTVRKIDAAISDKEKNKTYFFVEDKYWRFDEKRNSMEPGFPKQIAEDFPGIDSKIDAVFEEFGFFYFFTGSSQLEFDPNAKKVTHTLKSNSWLNC

SEQ ID NO: 67992 - protein, 23 aa, Homo sapiens
LQGPMSIWSLISFRLACCLPWAP

SEQ ID NO: 67993 - protein, 11 aa, Homo sapiens
LETLALGLCLL

SEQ ID NO: 67994 - protein, 150 aa, Homo sapiens
LEEMVMGLGVLLLVFVLGLGLTPPTLAQDNSRYTHFLTQHYDAKPQGRDDRYCESIMRRRGLTSPCKDINTFIHGNKRSIKAICENKNGNPHRENLRISKSSFQVTTCKLHGGSPWPPCQYRATAGFRNVVVACENGLPVHLDQSIFRRP

SEQ ID NO: 67995 - protein, 174 aa, Homo sapiens
LGCWGSVVVVAMFFSEARARSRTWEASPSEHRKWVEVFKACDEDHKGYLSREDFKTAVVMLFGYKPSKIEVDSVMSSINPNTSGILLEGFLNIVRKKKEAQRYRNEVRHIFTAFDTYYRGFLTLEDFKKAFRQVAPKLPERTVLEVFREVDRDSDGHVSFRDFEYALNYGQKEA

SEQ ID NO: 67996 - protein, 50 aa, Homo sapiens
ISCITLIGLFFAGIHKRVVAPSIIAARCRTVLAEYNMSCDDVSIFLVRKL

SEQ ID NO: 67997 - protein, 314 aa, Homo sapiens
LAGWLCLSLASVWLARRMWTLRSPLTRSLYVNMTSGPGGPAAAAGGRKENHQWYVCNREKLCESLQAVFVQSYLDQGTQIFLNNSIEKSGWLFIQLYHSFVSSVFSLFMSRTSINGLLGRGSMFVFSPDQFQRLLKINPDWKTHRLLDLGAGDGEVTKIMSPHFEEIYATELSETMIWQLQKKKYRVLGINEWQNTGFQYDVISCLNLLDRCDQPLTLLKDIRSVLEPTRGRVILALVLPFHPYVENGGKWEKPSEILEIKGQNWEEQVNSLPEVFRKAGFVIEAFTRLPYLCEGDMYNDYYVLDDAVFVLKPV

SEQ ID NO: 67998 - protein, 42 aa, Homo sapiens
IHCLDKSIFSGRVPGSSSSFLLFLLLLHLRLLGDHCPLSAAE

SEQ ID NO: 67999 - protein, 62 aa, Homo sapiens
ICLVLTIFANLFPAACTGAHERTFLAVKPDGVQRRLVGEIVRRFERKGFKLVALKLVQVGAR

SEQ ID NO: 68000 - protein, 577 aa, Homo sapiens
LALLGWWWFFSRKKGHVSSHDEQQVEAGAVQLRADPAIKEPLPVEDVCPKVVSTPPSVTEPPEKELSTVSKLPAEPPALLQTHPPCRRSESSGILPNTTDMRLRPGTRRDDSTKLELALTGGEAKSIPLECPLSSPKGVLFSSKSAEVCKQDSPFSRVPRKVQPGYPVVPAEKRSSGERARETGGAEGTGDAVLGEKVLEEALLSREHVLELENSKGPSLASLEGEEDKGKSSSSQVVGPVQEEEYVAEKLPSRFIESAHTELAKDDAAPAPPVADAKAQDRGVEGELGNEESLDRNEEGLDRNEEGLDRNEESLDRNEEGLDRNEEIKRAAFQIISQVISEATEQVLATTVGKVAGRVCQASQLQGQKEESCVPVHQKTVLGPDTAEPATAEAAVAPPDAGLPLPGLPAEGSPPPKTYVSCLKSLLSSPTKDSKPNISAHHISLASCLALTTPSEELPDRAGILVEDATCVTCMSDSSQSVPLVASPGHCSDSFSTSGLEDSCTETSSSPRDKAITPPLPESTVPFSNGVLKGELSDLGAEDGWTMDAEADHSGVAAPPPGKRGTLITRCPGFFEC

SEQ ID NO: 68001 - protein, 68 aa, Homo sapiens
IFKLDVSTVLLFCLESGTRGASACAAGAAGNSGCFSLSLSFLGAHFCCFDSRAYQVRSEGGRRQCPFC

SEQ ID NO: 68002 - protein, 36 aa, Homo sapiens
ISNSSLPPSVRLMALLAGWIIELSGGTDAAAIPNKS

SEQ ID NO: 68003 - protein, 551 aa, Homo sapiens
LLAFNALLLLLLVAFIMGPQVAFPPALPGPAPVCTGLELLTGAGCFTHTVMYYGHYSNATLNQPCGSPLDGSQCTPRVGGLPYNMPLAYLSTVGVSFFITCITLVYSMAHSFGESYRVGSTSGIHAITVFCSWDYKVTQKRASRLQQDNIRTRLKELLAEWQLRHSPRSVCGRLRQAAVLGLVWLLCLGTALGCAVAVHVFSEFMIQSPEAAGQEAVLLVLPLVVGLLNLGAPYLCRVLAALEPHDSPVLEVYVAICRNLILKLAILGTLCYHWLGRRVGVLQGQCWEDFVGQELYRFLVMDFVLMLLDTLFGELVWRIISEKKLKRRRKPEFDIARNVLELIYGQTLTWLGVLFSPLLPAVQIIKLLLVFYVKKTSLLANCQAPRRPWLASHMSTVFLTLLCFPAFLGAAVFLCYAVWQVKPSSTCGPFRTLDTMYEAGRVWVRHLEAAGPRVSWLPWVHRYLMENTFFVFLVSALLLAVIYLNIQVVRGQRKVICLLKEQISNEGEDKIFLINKLHSIYERKEREERSRVGTTEEAAAPPALLTDEQDA

SEQ ID NO: 68004 - protein, 23 aa, Homo sapiens
RKGVCELSRALALSAMGLAACRA

SEQ ID NO: 68005 - protein, 43 aa, Homo sapiens
LWTRAKMTSLSWTFFSLLLAVFPLMPVVGRKPDISLVILKECI

SEQ ID NO: 68006 - protein, 36 aa, Homo sapiens
LAAAFLVAFVLLLYMVSPLISPKPLALPGAHVVFFR

SEQ ID NO: 68007 - protein, 36 aa, Homo sapiens
LAAAFLVAFVLLLYMVSPLISPKPLALPGAHVVWEG

SEQ ID NO: 68008 - protein, 320 aa, Homo sapiens
VLLLYMVSPLISPKPLALPGAHVVVTGGSSGIGKCIAIECYKQGAFITLVARNEDKLLQAKKEIEMHSINDKQVVLCISVDVSQDYNQVENVIKQAQEKLGPVDMLVNCAGMAVSGKFEDLEVSTFERLMSINYLGSVYPSRAVITTMKERRVGRIVFVSSQAGQLGLFGFTAYSASKFAIRGLAEALQMEVKPYNVYITVAYPPDTDTPGFAEENRTKPLETRLISETTSVCKPEQVAKQIVKDAIQGNFNSSLGSDGYMLSALTCGMAPVTSITEGLQQVVTMGLFRTIALFYLGSFDSIVRRCMMQREKSENADKTA

SEQ ID NO: 68009 - protein, 667 aa, Homo sapiens
LLLAIVGYVAVGIIAWTHGDPRKVIYPTDSRGEFCGQKGTKNENKPYLFYFNIVKCASPLVLLEFQCPTPQICVEKCPDRYLTYLNARSSRDFEYYKQFCVPGFKNNKGVAEVLQDGDCPAVLIPSKPLARRCFPAIHAYKGVLMVGNETTYEDGHGSRKNITDLVEGAKKANGVLEARQLAMRIFEDYTVSWYWIIIGLVIAMAMSLLFIILLRFLAGIMVWVMIIMVILVLGYGIFHCYMEYSRLRGEAGSDVSLVDLGFQTDFRVYLHLRQTWLAFMIILSILEVIIILLLIFLRKRILIAIALIKEASRAVGYVMCSLLYPLVTFFLLCLCIAYWASTAVFLSTSNEAVYKIFDDSPCPFTAKTCNPETFPSSNESRQCPNARCQFAFYGGESGYHRALLGLQIFNAFMFFWLANFVLALGQVTLAGAFASYYWALRKPDDLPAFPLFSAFGRALRYHTGSLAFGALILAIVQIIRVILEYLDQRLKAAENKFAKCLMTCLKCCFWCLEKFIKFLNRNAYIMIAIYGTNFCTSARNAFFLLMRNIIRVAVLDKVTDFLFLLGKLLIVGSVGILAFFFFTHRIRIVQDTAPPLNYYWVPILTVIVGSYLIAHGFFSVYGMCVDTLFLCFLEDLERNDGSAERPYFMSSTLKKLLNKTNKKAAES

SEQ ID NO: 68010 - protein, 11 aa, Homo sapiens
VSIPGHWILLL

SEQ ID NO: 68011 - protein, 546 aa, Homo sapiens
KALFVLFVLAYIHIVFSRSPINCLEHVRDKWPREGILRVEVRHNSSRAPVFLQFCDSGGRGSFPGLAVEPGSNLDMEDEEEEELTMEMFGNSSIKFELDIEPKVFKPPSSTEALNDSQEFPFPETPTKVWPQDEYIVEYSLEYGFLRLSQATRQRLSIPVMVVTLDPTRDQCFGDRFSRLLLDEFLGYDDILMSSVKGLAENEENKGFLRNVVSGEHYRFVSMWMARTSYLAAFAIMVIFTLSVSMLLRYSHHQIFVFIVDLLQMLEMNMAIAFPAAPLLTVILALVGMEAIMSEFFNDTTTAFYIILIVWLADQYDAICCHTSTSKRHWLRFFYLYHFAFYAYHYRFNGQYSSLALVTSWLFIQHSMIYFFHHYELPAILQQVRIQEMLLQAPPLGPGTPTALPDDMNNNSGAPATAPDSAGQPPALGPVSPGASGSPGPVAAAPSSLVAAAASVAAAAGGDLGWMAETAAIITDASFLSGLSASLLERRPASPLGPAGGLPHAPQDSVPPSDSAASDTTPLGAAVGGPSPASMAPTEAPSEVGS

SEQ ID NO: 68012 - protein, 65 aa, Homo sapiens
VVLLLVAVRLHTLLSCPLEQPAGTEWILEEGVTTGPPRKPRADIYNLRSPDEFIVGQNQALIEPG

SEQ ID NO: 68013 - protein, 49 aa, Homo sapiens
MGVTTATLISPALWTLRTSAVCSTTAVTSFSACTFVSTSCSKKGTPKFN

SEQ ID NO: 68014 - protein, 60 aa, Homo sapiens
VITMALAAVVTEVALANLNVVETVAGVTNQMKMIGQNHSHQVNAWNSKFLKCMLLVMKPY

SEQ ID NO: 68015 - protein, 836 aa, Homo sapiens
LALLLLLLLLLLLQLQHLAAAAADPLLGGQGPAKDCEKDQFQCRNERCIPSVWRCDEDDDCLDHSDEDDCPKKTCADSDFTCDNGHCIHERWKCDGEEECPDGSDESEATCTKQVCPAEKLSCGPTSHKCVPASWRCDGEKDCEGGADEAGCATSLGTCRGDEFQCGDGTCVLAIKHCNQEQDCPDGSDEAGCLQVPPTFLGNRRRPRGLNECLHNNGGCSHICTDLKIGFECTCPAGFQLLDQKTCGDIDECKDPDACSQICVNYKGYFKCECYPGYEMDLLTKNCKAAAGKSPSLIFTNRHEVRRIDLVKRNYSRLIPMLKNVVALDVEVATNRIYWCDLSYRKIYSAYMDKASDPKEQEVLIDEQLHSPEGLAVDWVHKHIYWTDSGNKTISVATVDGGRRRTLFSRNLSEPRAIAVDPLRGFMYWSDWGDQAKIEKSGLNGVDRQTLVSDNIEWPNGITLDLLSQRLYWVDSKLHQLSSIDFSGGNRKTLISSTDFLSHPFGIAVFEDKVFWTDLENEAIFSANRLNGLEISILAENLNNPHDIVIFHELKQPRAPDACELSVQPNGGCEYLCLPAPQISSHSPKYTCACPDTMWLGPDMKRCYRAPQSTSTTTLASTMTRTVPATTRAPGTTVHRSTYQNHSTETPSLTAAVPSSVSVPRAPSISPSTLSPATSNHSQHYANEDSKMGSTVTAAVIGIIVPIVVIALLCMSGYLIWRNWKRKNTKSMNFDNPVYRKTTEEEDEDELHIGRTAQIGHVYPAAISSFDRPLWAEPCLGETREPEDPAPALKELFVLPGEPRSQLHQLPKNPLSELPVVKSKRVALSLEDDGLP

SEQ ID NO: 68016 - protein, 9 aa, Homo sapiens
IFLQLLVWW

SEQ ID NO: 68017 - protein, 966 aa, Homo sapiens
LLVLLVFPSSCLAFRSPLSVFKRFKETTRPFSNECLGTTRPVVPIDSSDFALDIRMPGVTPKQSDTYFCMSMRIPVDEEAFVIDFKPRASMDTVHHMLLFGCNMPSSTGSYWFCDEGTCTDKANILYAWARNAPPTRLPKGVGFRVGGETGSKYFVLQVHYGDISAFRDNNKDCSGVSLHLTRLPQPLIAGMYLMMSVDTVIPAGEKVVNSDISCHYKNYPMHVFAYRVHTHHLGKVVSGYRVRNGQWTLIGRQSPQLPQAFYPVGHPVDVSFGDLLAARCVFTGEGRTEATHIGGTSSDEMCNLYIMYYMEAKHAVSFMTCTQNVAPDMFRTIPPEANIPIPVKSDMVMMHEHHKETEYKDKIPLLQQPKREEEEVLDQGDFYSLLSKLLGEREDVVHVHKYNPTEKAESESDLVAEIANVVQKKDLGRSDAREGAEHERGNAILVRDRIHKFHRLVSTLRPPESRVFSLQQPPPGEGTWEPEHTGDFHMEEALDWPGVYLLPGQVSGVALDPKNNLVIFHRGDHVWDGNSFDSKFVYQQIGLGPIEEDTILVIDPNNAAVLQSSGKNLFYLPHGLSIDKDGNYWVTDVALHQVFKLDPNNKEGPVLILGRSMQPGSDQNHFCQPTDVAVDPGTGAIYVSDGYCNSRIVQFSPSGKFITQWGEESSGSSPLPGQFTVPHSLALVPLLGQLCVADRENGRIQCFKTDTKEFVREIKHSSFGRNVFAISYIPGLLFAVNGKPHFGDQEPVQGFVMNFSNGEIIDIFKPVRKHFDMPHDIVASEDGTVYIGDAHTNTVWKFTLTEKLEHRSVKKAGIEVQEIKEAEAVVETKMENKPTSSELQKMQEKQKLIKEPGSGVPVVLITTLLVIPVVVLLAIAIFIRWKKSRAFGDSEHKLETSSGRVLGRFRGKGSGGLNLGNFFASRKGYSRKGFDRLSTEGSDQEKEDDGSESEEEYSAPLPALAPSSS

SEQ ID NO: 68018 - protein, 18 aa, Homo sapiens
IFHITFIIMWLCGRNKGE

SEQ ID NO: 68019 - protein, 355 aa, Homo sapiens
IIAVLGLMFYCKKRCKAKRLQKQPEGEEPEMECLNGGPLQNGQPSAEIQEEVALTSLGSGPAATNKRHSTSDKMHFPRSSLQPITTLGKSEFGEVFLAKAQGLEEGVAETLVLVKSLQSKDEQQQLDFRRELEMFGKLNHANVVRLLGLCREAEPHYMVLEYVDLGDLKQFLRISKSKDEKLKSQPLSTKQKVALCTQVALGMEHLSNNRFVHKDLAARNCLVSAQRQVKVSALGLSKDVYNSEYYHFRQAWVPLRWMSPEAILEGDFSTKSDVWAFGVLMWEVFTHGEMPHGGQADDEVLADLQAGKARLPQPEGCPSKLYRLMQRCWALSPKDRPSFSEIASALGDSTVDSKP

SEQ ID NO: 68020 - protein, 147 aa, Homo sapiens
TRARDMRLSWFRVLTVLSICLSAVATATGAEGKRKLQIGVKKRVDHCPIKSRKGDVLHMHYTGKLEDGTEFDSSLPQNQPFVFSLGTGQVIKGWDQGLLGMCEGEKRKLVIPSELGYGERGAPPKIPGGATLVFEVELLKIERRTEL

SEQ ID NO: 68021 - protein, 64 aa, Homo sapiens
LRHRRPEPPLLCCLLLFLRAPVSARPPTLLRILKETGRSPDEVTHGTICLSEPELNLRREGLWK

SEQ ID NO: 68022 - protein, 51 aa, Homo sapiens
LGAGWQVPWRLLALVLLVLGPRSGATETQLWKHLDPLPRSPSFPEPEAAGH

SEQ ID NO: 68023 - protein, 38 aa, Homo sapiens
VYCICPVWCSVAGMVCLLLERSPENSVLDWCCHLPGNA

SEQ ID NO: 68024 - protein, 472 aa, Homo sapiens
LPSRSPPTPLLWPLLLLLLLETGAQDVRVQVLPEVRGQLGGTVELPCHLLPPVPGLYISLVTWQRPDAPANHQNVAAFHPKMGPSFPSPKPGSERLSFVSAKQSTGQDTEAELQDATLALHGLTVEDEGNYTCEFATFPKGSVRGMTWLRVIAKPKNQAEAQKVTFSQDPTTVALCISKEGRPPARISWLSSLDWEAKETQVSGTLAGTVTVTSRFTLVPSGRADGVTVTCKVEHESFEEPALIPVTLSVRYPPEVSISGYDDNWYLGRTDATLSCDVRSNPEPTGYDWSTTSGTFPTSAVAQGSQLVIHAVDSLFNTTFVCTVTNAVGMGRAEQVIFVRETPRASPRDVGPLVWGAVGGTLLVLLLLAGGSLAFILLRVRRRRKSPGGAGGGASGDGGFYDPKAQVLGNGDPVFWTPVVPGPMEPDGKDEEEEEEEEKAEKGLMLPPPPALEDDMESQLDGSLISRRAVYV

SEQ ID NO: 68025 - protein, 36 aa, Homo sapiens
MEAITVVLHRVSLLLLWHLRTSDSALDKPLESLAME

SEQ ID NO: 68026 - protein, 67 aa, Homo sapiens
MVMEAMILILVMMNAVENPAKGKKGQLKMTYCSKNHFRKKNMERWPINKLQQNCWIGKKQEIEGFIS

SEQ ID NO: 68027 - protein, 509 aa, Homo sapiens
MASRLTLLTLLLLLLAGDRASSNPNATSSSSQDPESLQDRGEGKVATTVISKMLFVEPILEVSSLPTTNSTTNSATKITANTTDEPTTQPTTEPTTQPTIQPTQPTTQLPTDSPTQPTTGSFCPGPVTLCSDLESHSTEAVLGDALVDFSLKLYHAFSAMKKVETNMAFSPFSIASLLTQVLLGAGENTKTNLESILSYPKDFTCVHQALKGFTTKGVTSVSQIFHSPDLAIRDTFVNASRTLYSSSPRVLSNNSDANLELINTWVAKNTNNKISRLLDSLPSDTRLVLLNAIYLSEQPSHLFPLAKWKTTFDPKKTRMEPFHFKNSVIKVPMMNSKKYPVAHFIDQTLKAKVGQLQLSHNLSLVILVPQNLKHRLEDMEQALSPSVFKAIMEKLEMSKFQPTLLTLPRIKVTTSQDMLSIMEKLEFFDFSYDLNLCGLTEDPDLQVSAMQHQTVLELTETGVEAAAASAISVARTLLVFEVQQPFLFVLWDQQHKFPVFMGRVYDPRA

SEQ ID NO: 68028 - protein, 165 aa, Homo sapiens
MSPRRTLPRPLSLCLSLCLCLCLAAALGSAQSGSCRDKKNCKVVFSQQELRKRLTPLQYHVTQEKGTESAFEGEYTHHKDPGIYKCVVCGTPLFKSETKFDSGSGWPSFHDVINSEAITFTDDFSYGMHRVETSCSQQEGPHQMLPLNLGFPGLQNCEPINFYSF

SEQ ID NO: 68029 - protein, 267 aa, Homo sapiens
MDAAFLLVLGLLAQSLCLSLGVPGWRRPTTLYPWRRAPALSRVRRAWVIPPISVSENHKRLPYPLVQIKSDKQQLGSVIYSIQGPGVDEEPRGVFSIDKFTGKVFLNAMLDREKTDRFRLRAFALDLGGSTLEDPTDLEIVVVDQNDNRPAFLQEAFTGRVLEGAVPGTYVTRAEATDADDPETDNAALRFSILQQGSPELFSIDELTGEIRTVQVGLDREVRWRPGSSTPARPGQPISCGSLCPQPAHPRRSCPCRHCRACSGPGS

SEQ ID NO: 68030 - protein, 331 aa, Homo sapiens
MWSGWWLWPLVAVCTADFFRDEAERIMRDSPVIDGHNDLPWQLLDMFNNRLQDERANLTTLAGTHTNIPKLRAGFVGGQFWSVYTPCDTQNKDAVRRTLEQMDVVHRMCRMYPETFLYVTSSAGIRQAFREGKVASLIGVEGGHSIDSSLGVLRALYQLGMRYLTLTHSCNTPWADNWLVDTGDSEPQSQGLSPFGQRVVKELNRLGVLIDLAHVSVATMKATLQLSRAPVIFSHSSAYSVCASRRNVPDDVLRLVKQTDSLVMVNFYNNYISCTNKANLSQVAGRWGVSGQGGRRGRASLGTHTCCSLDRPSGSHQGGGRSQSRGFWWGL

SEQ ID NO: 68031 - protein, 466 aa, Homo sapiens; identical to SEQ ID NO: 6620

SEQ ID NO: 68032 - protein, 670 aa, Homo sapiens
MRVPALLVLLFCFRGRAGPSPHFLQQPEDLVVLLGEEARLPCALGAYWGLVQWTKSGLALGGQRDLPGWSRYWISGNAANGQHDLHIRPVELEDEASYECQATQAGLRSRPAQLHVLVPPEAPQVLGGPSVSLVAGVPANLTCRSRGDARPTPELLWFRDGVLLDGATFHQTLLKEGTPGSVESTLTLTPFSHDDGATFVCRARSQALPTGRDTAITLSLQYPPEVTLSASPHTVQEGEKVIFLCQATAQPPVTGYRWAKGGSPVLGARGPRLEVVADASFLTEPVSCEVSNAVGSANRSTALDVLFGPILQAKPEPVSVDVGEDASFSCAWRGNPLPRVTWTRRGGAQVLGSGATLRLPSVGPEDAGDYVCRAEAGLSGLRGGAAEARLTVNAPPVVTALHSAPAFLRGPARLQCLVFASPAPDAVVWSWDEGFLEAGSQGRFLVETFPAPESRGGLGPGLISVLHISGTQESDFSRSFNCSARNRLGEGGAQASLGRRASASFSEQKNLMRIPGSSDGSSSRGPEEEETGSREDRGPIVHTDHSDLVLEEEGTLETKDPTNGYYKVRGVSVSLSLGEAPGGGLFLPPPSPLGPPGTPTFYDFNPHLGMVPPCRLYRARAGYLTTPHPRAFTSYIKPTSFGPPDLAPGTPPFPYAAFPTPSHPRLQTHV

SEQ ID NO: 68033 - protein, 194 aa, Homo sapiens
MNKFLLVRQVLFPLPTPLSVFALLTGPGSELPAVCIGVSPGRPGKSVLFHTVRFGALSCWLGEMSTEHRGPVQVTQVEEDMVMVLMDGSVKLVTPEGSPVRGLRTPEIPMTEAVEAVAMVGGQLQAFWKHGVQVWALGSDQLLQELRDPTLTFRLLGSPRLECSGTISPHCNLLLPGSSNSPASASRVAGITGL

SEQ ID NO: 68034 - protein, 585 aa, Homo sapiens
MTVTLPLILTVVFPVKRRNRHSLVGPQQLGGRPAPVRRSNTMPPNLGNAGLLGRMLDEKTPPSPSGQPEEPGMVRLVCGHHNWIAVAYTQFLVCYRLKEASGWQLVFSSPRLDWPIERLALTARVHGGALGEHDKMVAAATGSEILLWALQAEGGGSEIGVFHLGVPVEALFFVGNQLIATSHTGRIGVWNAVTKHWQVQEVQPITSYDAAGSFLLLGCNNGSIYYVDVQKFPLRMKDNDLLVSELYRDPAEDGVTALSVYLTPKTSDSGNWIEIAYGTSSGGVRVIVQHPETVGSGPQLFQTFTVHRSPVTKIMLSEKHLISVCADNNHVRTWSVTRFRGMISTQPGSTPLASFKILALESADGHGGCSAGNDIGPYGERDDQQVFIQKVVPSASQLFVRLSSTGQRVCSVRSVDGSPTTAFTVLECEGSRRLGSRPRRYLLTGQANGSLAMWDLTTAMDGLGQAPAGGLTEQELMEQLEHCELAPPAPSAPSWGCLPSPSPRISLTSLHSASSNTSLSGHRGSPSPPQAEARRRGGGSFVERCQELVRSGPDLRRPPTPAPWPSSGLGTPLTPPKMKLNETSF

SEQ ID NO: 68035 - protein, 777 aa, Homo sapiens
MAGAGGGLGVWGNLVLLGLCSWTGARAPDLPSQFSAPNPGRNLTVETQTTSSISLSWEVPDGLDSQNSNYWVQCTGDGGTTETRNTTATNVTVDGLGPGSLYTCSVWVEKDGVNSSVGTVTTATAPNPVRNLRVEAQTNSSIALTWEVPDGPDPQNSTYGVEYTGDGGRAGTRSTAHTNITVDGLEPGCLYAFSMWVGKNGINSSRETRNATTAHNPVRNLRVEAQTTSSISLSWEVPDGTDPQNSTYCVQCTGDGGRTETRNTTDTRVTVDGLGPGSLYTCSVWVEKDGVNSSVEIVTSATAPNPVRNLTVEAQTNSSIALTWEVPDGPDPQNSTYGVEYTGDGGRAGTRSTAHTNITVDRLEPGCLYVFSVWVGKNGINSSRETRNATTAPNPVRNLHMETQTNSSIALCWEVPDGPYPQDYTYWVEYTGDGGGTETRNTTNTSVTAERLEPGTLYTFSVWAEKNGARGSRQNVSISTVPNAVTSLSKQDWTNSTIALRWTAPQGPGQSSYSYWVSWVREGMTDPRTQSTSGTDITLKELEAGSLYHLTVWAERNEVRGYNSTLTAATAPNEVTDLQNETQTKNSVMLWWKAPGDPHSQLYVYWVQWASKGHPRRGQDPQANWVNQTSRTNETWYKVEALEPGTLYNFTVWAERNDVASSTQSLCASTYPDTVTITSCVSTSAGYGVNLIWSCPQGGYEAFELEVGGQRGSQDRSSCGEAVSVLGLGPARSYPATITTIWDGMKVVSHSVVCHTESAGLLRSCSLGAFKADEDGP

SEQ ID NO: 68036 - protein, 796 aa, Homo sapiens
MLLLLLLQVAGPVGALAETLLNAPRAMGTSSSPPSPASVVAPGTTLFEESRLPVFTLDYPHVQIPFEITLWILLASLAKIGFHLYHKLPTIVPESCLLIMVGLLLGGIIFGVDEKSPPAMKTDVFFLYLLPPIVLDAGYFMPTRPFFENIGTIFWYAVVGTLWNSIGIGVSLFGICQIEAFGLSDITLLQNLLFGSLISAVDPVAVLAVFENIHVNEQLYILVFGESLLNDAVTVVLYNLFKSFCQMKTIETIDVFAGIANFFVVGIGGVLIGIFLGFIAAFTTRFTHNIRVIEPLFVFLYSYLSYITAEMFHLSGIMAITACAMTMNKYVEENVSQKSYTTIKYFMKMLSSVSETLIFIFMGVSTVGKNHEWNWAFVCFTLAFCLMWRALGVFVLTQVINRFRTIPLTFKDQFIIAYGGLRGAICFALVFLLPAAVFPRKKLFITAAIVVIFFTVFILGITIRPLVEFLDVKRSNKKQQAVSEEIYCRLFDHVKTGIEDVCGHWGHNFWRDKFKKFDDKYLRKLLIRENQPKSSIVSLYKKLEIKHAIEMAETGMISTVPTFASLNDCREEKIRKVTSSETDEIRELLSRNLYQIRQRTLSYNRHSLTADTSERQAKEILIRRRHSLRESIRKDSSLNREHRASTSTSRYLSLPKNTKLPEKLQKRRTISIADGNSSDSDADAGTTVLNLQPRARRFLPEQFSKKSPQSYKMEWKNEVDVDSGRDMPSTPPTPHSREKGTQTSGLLQQPLLSKDQSGSEREDSLTEGIPPKPPPRLVWRASEPGSRKARFGSEKP

SEQ ID NO: 68037 - protein, 70 aa, Homo sapiens
MSTLWLVGAGPGLVLAPELLLDPWQGEGQPRGPWRKQETCCRAWAHLAGAAQGLQGSNRDGAQCPGKAWP

SEQ ID NO: 68038 - protein, 295 aa, Homo sapiens
MWFFYALIPCLLTDEVAILPAPQNLSVLSTNMKHLLMWSPVIAPGETVYYSVEYQGEYESLYTSHIWIPSSWCSLTEGPECDVTDDITATVPYNLRVRATLGSQTSAWSILKHPFNRNSTILTRPGMEITKDGFHLVIELEDLGPQFEFLVAYWRREPGAEEHVKMVRSGGIPVHLETMEPGAAYCVKAQTFVKAIGRYSAFSQTECVEVQGEAIPLVLALFAFVGFMLILVVVPLFVWKMGRLLQYSCCPVVVLPDTLKITNSPQKLISCRREEVDACATAVMSPEELLRAWIS

SEQ ID NO: 68039 - protein, 132 aa, Homo sapiens [sequence omitted]

SEQ ID NO: 68040 - protein, 52 aa, Homo sapiens
MVTNLLCLIMTFCQDEQLIDLMLLLYQPTHRRPRCQDQTQASVFNISCPSDA

SEQ ID NO: 68041 - protein, 103 aa, Homo sapiens
MARAALSAAPSNPRLLRVALLLLLLVAAGRRAAGASVATELRCQCLQTLQGIHPKNIQSVNVKSPGPHCAQTEVIATLKNGRKACLNPASPIVKKIIEKMLNR

SEQ ID NO: 68042 - protein, 1004 aa, Homo sapiens
MLVWLVASGIVFYGELWVCAGLDYDYTFDGNEEDKTETIDYKDPCKAAVFWGDIALDDEDLNIFQIDRTIDLTQNPFGNLGHTTGGLGDHAMSKKRGALYQLIDRIRRIGFGLEQNNTVKGKVPLQFSGQNEKNRVPRAATSRTERIWPGGVIPYVIGGNFTGSQRAMFKQAMRHWEKHTCVTFIERSDEESYIVFTYRPCGCCSYVGRRGNGPQAISIGKNCDKFGIVVHELGHVIGFWHEHTRPDRDNHVTIIRENIQPGQEYNFLKMEPGEVNSLGERYDFDSIMHYARNTFSRGMFLDTILPSRDDNGIRPAIGQRTRLSKGDIAQARKLYRCPACGETLQESNGNLSSPGFPNGYPSYTHCIWRVSVTPGEKIVLNFTTMDLYKSSLCWYDYIEVRDGYWRKSPLLGRFCGDKLPEVLTSTDSRMWIEFRSSSNWVGKGFAAVYEAICGGEIRKNEGQIQSPNYPDDYRPMKECVWKITVSESYHVGLTFQSFEIERHDNCAYDYLEVRDGTSENSPLIGRFCGYDKPEDIRSTSNTLWMKFVSDGTVNKAGFAANFFKEEDECAKPDRGGCEQRCLNTLGSYQCACEPGYELGPDRRSCEAACGGLLTKLNGTITTPGWPKEYPPNKNCVWQVVAPTQYRISVKFEFFELEGNEVCKYDYVEIWSGLSSESKLHGKFCGAEVPEVITSQFNNMRIEFKSDNTVSKKGFKAHFFSDKDECSKDNGGCQHECVNTMGSYMCQCRNGFVLHDNKHDCKEAECEQKIHSPSGLITSPNWPDKYPSRKECTWEISATPGHRIKLAFSEFEIEQHQECAYDHLEVFDGETEKSPILGRLCGNKIPDPLVATGNKMFVRFVSDASVQRKGFQATHSTECGGRLKAESKPRDLYSHAQFGDNNYPGQVDCEWLLVSERGSRLELSFQTFEVEEEADCGYDYVELFDGLDSTAVGLGRFCGSGPPEEIYSIGDSVLIHFHTDDTINKKGFHIRYKSIRYPDTTHTKK

SEQ ID NO: 68043 - protein, 51 aa, Homo sapiens
MVSKCLALYFVAFWQPFKAAVKERRESRHGRKCFIPGSSSGARLDTTRGTA

SEQ ID NO: 68044 - protein, 53 aa, Homo sapiens
MSLVLLFLIRTALFAPQGAAADGASLCRQSWSAVARSRLTASSASRIQVIPLP

SEQ ID NO: 68045 - protein, 132 aa, Homo sapiens
MLGLCGQRLPAAWVLLLLPFLPLLLLAAPAPHRASYKPVIVVHGLFDSSYSFRHLLEYINETHPGTVVTVLDLFDGRESLRPLWEQVQGFREAVVPIMAKAPQGVHLICYSQDGTVWRHGLLEVAVPHLHAV

SEQ ID NO: 68046 - protein, 410 aa, Homo sapiens [sequence omitted]

SEQ ID NO: 68047 - protein, 35 aa, Homo sapiens
MLIAVLLLPLRRRWRRPWDPRKPACWRSWSSRTKQ

SEQ ID NO: 68048 - protein, 627 aa, Homo sapiens
MLRAAVILLLIRTWLAEGNYPSPIPKFHFEFSSAVPEVVLNLFNCKNCANEAVVQKILDRVLSRYDVRLRPNFGGAPVPVRISIYVTSIEQISEMNMDYTITMFFHQTWKDSRLAYYETTLNLTLDYRMHEKLWVPDCYFLNSKDAFVHDVTVENRVFQLHPDGTVRYGIRLTTTAACSLDLHKFPMDKQACNLVVESYGYTVEDIILFWDDNGNAIHMTEELHIPQFTFLGRTITSKEVYFYTGSYIRLILKFQVQREVNSYLVQVYWPTVLTTITSWISFWMNYDSSAARVTIGLTSMLILTTIDSHLRDKLPNISCIKAIDIYILVCLFFVFLSLLEYVYINYLFYSRGPRRQPRRHRRPRRVIARYRYQQVVVGNVQDGLINVEDGVSSLPITPAQAPLASPESLGSLTSTSEQAQLATSESLSPLTSLSGQAPLATGESLSDLPSTSEQARHSYGVRFNGFQADDSIIPTEIRNRVEAHGHGVTHDHEDSNESLSSDERHGHGPSGKPMLHHGEKGVQEAGWDLDDNNDKSDCLAIKEQFKCDTNSTWGLNDDELMAHGQEKDSSSESEDSCPPSPGCSFTEGFSFDLFNPDYVPKVDKWSRFLFPLAFGLFNIVYWVYHMY

SEQ ID NO: 68049 - protein, 20 aa, Homo sapiens
IYPQLREALVTLLLQCLVSL

SEQ ID NO: 68050 - protein, 309 aa, Homo sapiens
LGYLLYLVFGAVVFSSVELPYEDLLRQELRKLKRRFLEEHECLSEQQLEQFLGRVLEASNYGVSVLSNASGNWNWDFTSALFFASTVLSTTGYGHTVPLSDGGKAFCIIYSVIGIPFTLLFLTAVVQRITVHVTRRPVLYFHIRWGFSKQVVAIVHAVLLGFVTVSCFFFIPAAVFSVLEDDWNFLESFYFCFISLSTIGLGDYVPGEGYNQKFRELYKIGITCYLLLGLIAMLVVLETFCELHELKKFRKMFYVKKDKDEDQVHIIEHDQLSFSSITDQAAGMKEDQKQNEPFVATQSSACVDGPANH

SEQ ID NO: 68051 - protein, 12 aa, Homo sapiens
LAPSWFSVTLVL

SEQ ID NO: 68052 - protein, 63 aa, Homo sapiens
LLLLWLSLPVRLPSFVVSQRCAGLLLAALRIQGVGCQVQGLRLGKRRETIALPRPASAPVHPG

SEQ ID NO: 68053 - protein, 39 aa, Homo sapiens
LASWLAWRSLLCASVCPLPPSLSCPSRGSPASRCWWRTS

SEQ ID NO: 68054 - protein, 15 aa, Homo sapiens
RGWLVVLGVMCVIGL

SEQ ID NO: 68055 - protein, 47 aa, Homo sapiens
VRPLRSEARRALLACCLFLLLSGARPRSGGGAVMREAAGGGPESETA

SEQ ID NO: 68056 - protein, 188 aa, Homo sapiens
ISMKLLSLVAVVGCLLVPPAEANKVRESSEDIRCKCICPPYRNISGHIYNQNVSQKDCNCLHVVEPMPVPGHDVEAYCLLCECRYEERSTTTIKVIIVIYLSVVGALLLYMAFLMLVDPLIRKPDAYTEQLHNEEENEDARSMAAAAASLGGPRANTVLERVEGAQQRWKLQVQEQRKTVFDRHKMLS

SEQ ID NO: 68057 - protein, 44 aa, Homo sapiens
LFLAGLMLVTGSINTLSAKWADNFMAEGCGGSKEHSFQHPFLQL

SEQ ID NO: 68058 - protein, 1004 aa, Homo sapiens
IRSPGMGPAPLPLLLGLFLPALWRRAITEAREEAKPYPLFPGPFPGSLQTDHTPLLSLPHASGYQPALMFSPTQPGRPHTGNVAIPQVTSVESKPLPPLAFKHTVGHIILSEHKGVKFNCSISVPNIYQDTTISWWKDGKELLGAHHAITQFYPDDEVTAIIASFSITSVQRSDNGSYICKMKINNEEIVSDPIYIEVQGLPHFTKQPESMNVTRNTAFNLTCQAVGPPEPVNIFWVQNSSRVNEQPEKSPSVLTVPGLTEMAVFSCEAHNDKGLTVSKGVQINIKAIPSPPTEVSIRNSTAHSILISWVPGFDGYSPFRNCSIQVKEADPLSNGSVMIFNTSALPHLYQIKQLQALANYSIGVSCMNEIGWSAVSPWILASTTEGAPSVAPLNVTVFLNESSDNVDIRWMKPPTKQQDGELVGYRISHVWQSAGISKELLEEVGQNGSRARISVQVHNATCTVRIAAVTRGGVGPFSDPVKIFIPAHGWVDYAPSSTPAPGNADPVLIIFGCFCGFILIGLILYISLAIRKRVQETKFGNAFTEEDSELVVNYIAKKSFCRRAIELTLHSLGVSEELQNKLEDVVIDRNLLILGKILGEGEFGSVMEGNLKQEDGTSLKVAVKTMKLDNSSQREIEEFLSEAACMKDFSHPNVIRLLGVCIEMSSQGIPKPMVILPFMKYGDLHTYLLYSRLETGPKHIPLQTLLKFMVDIALGMEYLSNRNFLHRDLAARNCMLRDDMTVCVADFGLSKKIYSGDYYRQGRIAKMPVKWIAIESLADRVYTSKSDVWAFGVTMWEIATRGMTPYPGVQNHEMYDYLLHGHRLKQPEDCLDELYEIMYSCWRTDPLDRPTFSVLRLQLEKLLESLPDVRNQADVIYVNTQLLESSEGLAQGSTLAPLDLNIDPDSIIASCTPRAAISVVTAEVHDSKPHEGRYILNGGSEEWEDLTSAPSAAVTAEKNSVLPGERLVRNGVSWSHSSMLPLGSSLPDELLFADDSSEGSEVLM

SEQ ID NO: 68059 - protein, 417 aa, Homo sapiens
IAVAYFGLTTLSASALAVALAFIIKPGSGAQTLQSSDLGLEDSGPPPVPKETVDSFLDLARNLFPSNLVVAAFRTYATDYKVVTQNSSSGNVTHEKIPIGTEIEGMNILGLVLFALVLGVALKKLGSEGEDLIRFFNSLNEATMVLVSWIMWYVPVGIMFLVGSKIVEMKDIIVLVTSLGKYIFASILGHVIHGGIVLPLIYFVFTRKNPFRFLLGLLAPFATAFATCSSSATLPSMMKCIEENNGVDKRISRFILPIGATVNMDGAAIFQCVAAVFIAQLNNVELNAGQIFTILVTATASSVGAAGVPAGGVLTIAIILEAIGLPTHDLPLILAVDWIVDRTTTVVNVEGDALGAGILHHLNQKATKKGEQELAEVKVEAIPNCKSEEETSPLVTHQNPAGPVASAPELESKESVL

SEQ ID NO: 68060 - protein, 80 aa, Homo sapiens
LILVFGALIFWIVTRPQWKRPKEPNSTILHPNGGTEQGARGSMPAYSGNNMDKSDSELNSEVAARKRNLALDEAGQRSTM

SEQ ID NO: 68061 - protein, 284 aa, Homo sapiens
RQSLLFLTSVVPFVLAPRPPDDPGFGPHQRLEKLDSLLSDYDILSLSNIQQHSVRKRDLQTSTHVETLLTFSALKRHFKLYLTSSTERFSQNFKVVVVDGKNESEYTVKWQDFFTGHVVGEPDSRVLAHIRDDDVIIRINTDGAEYNIEPLWRFVNDTKDKRMLVYKSEDIKNVSRLQSPKVCGYLKVDNEELLPKGLVDREPPEELVHRVKRRADPDPMKNTCKLLVVADHRFYRYMGRGEESTTTNYLIELIDRVDDIYRNTSWDNAGFKGYGIQIEQLLFE

SEQ ID NO: 68062 - protein, 21 aa, Homo sapiens
LRLRLRRLRFPMGLACGAWAL

SEQ ID NO: 68063 - protein, 410 aa, Homo sapiens
IQRARSSLVEGTMNWHLPLFLLASVTLPSICSHFNPLSLEELGSNTGIQVFNQIVKSRPHDNIVISPHGIASVLGMLQLGADGRTKKQLAMVMRYGVNGVGKILKKINKAIVSKKNKDIVTVANAVFVKNASEIEVPFVTRNKDVFQCEVRNVNFEDPASACDSINAWVKNETRDMIDNLLSPDLIDGVLTRLVLVNAVYFKGLWKSRFQPENTKKRTFVAADGKSYQVPMLAQLSVFRCGSTSAPNDLWYNFIELPYHGESISMLIALPTESSTPLSAIIPHISTKTIDSWMSIMVPKRVQVILPKFTAVAQTDLKEPLKVLGITDMFDSSKANFAKITTGSENLHVSHILQKAKIEVSEDGTKASAATTAILIARSSPPWFIVDRPFLFFIRHNPTGAVLFMGQINKP

SEQ ID NO: 68064 - protein, 58 aa, Homo sapiens
RAAEVAGSFKMRLLLLLLVAASAMVRSEASANLGGVPSKRLKMQYATGPLLKFQICVS

SEQ ID NO: 68065 - protein, 589 aa, Homo sapiens
LLLLLVGGAFLGACVAGSDEPGPEGLTSTSLLDLLLPTGLEPLDSEEPSETMGLGAGLGAPGSGFPSEENEESRILQPPQYFWEEEEELNDSSLDLGPTADYVFPDLTEKAGSIEDTSQAQELPNLPSPLPKMNLVEPPWHMPPREEEEEEEEEEEREKEEVEKQEEEEEEELLPVNGSQEEAKPQVRDFSLTSSSQTPGATKSRHEDSGDQASSGVEVESSMGPSLLLPSVTPTTVTPGDQDSTSQEAEATVLPAAGLGVEFEAPQEASEEATAGAAGLSGQHEEVPALPSFPQTTAPSGAEHPDEDPLGSRTSASSPLAPGDMELTPSSATLGQEDLNQQLLEGQAAEAQSRIPWDSTQVICKDWSNLAGKNYIILNMTENIDCEVFRQHRGPQLLALVEEVLPRHGSGHHGAWHISLSKPSEKEQHLLMTLVGEQGVVPTQDVLSMLGDIRRSLEEIGIQNYSTTSSCQARASQVRSDYGTLFVVLVVIGAICIIIIALGLLYNCWQRRLPKLKHVSHGEELRFVENGCHDNPTLDVASDSQSEMQEKHPSLNGGGALNGPGSWGALMGGKRDPEDSDVFEEDTHL

SEQ ID NO: 68066 - protein, 40 aa, Homo sapiens
LVVMPGFLVRILPLLLVLLLLGPTRGLRVSLRDPGTGRHC

SEQ ID NO: 68067 - protein, 428 aa, Homo sapiens
ICALFLTLLDMAQGFRGPLLPNRPFTTVWNANTQWCLERHGVDVDVSVFDVVANPGQTFRGPDMTIFYSSQLGTYPYYTPTGEPVFGGLPQNASLIAHLARTFQDILAAIPAPDFSGLAVIDWEAWRPRWAFNWDTKDIYRQRSRALVQAQHPDWPAPQVEAVAQDQFQGAARAWMAGTLQLGRALRPRGLWGFYGFPDCYNYDFLSPNYTGQCPSGIRAQNDQLGWLWGQSRALYPSIYMPAVLEGTGKSQMYVQHRVAEAFRVAVAAGDPNLPVLPYVQIFYDTTNHFLPLDELEHSLGESAAQGAAGVVLWVSWENTRTKESCQAIKEYMDTTLGPFILNVTSGALLCSQALCSGHGRCVRRTSHPKALLLLNPASFSIQLTPGGGPLSLRGALSLEDQAQMAVEFKCRCYPGWQAPWCERKSMW

SEQ ID NO: 68068 - protein, 21 aa, Homo sapiens
LLKQLSLLFGFLRLLASERHL

SEQ ID NO: 68069 - protein, 2132 aa, Homo sapiens
LGPALLQALWAGWVLTLQPLPPTAFTPNGTYLQHLARDPTSGTLYLGATNFLFQLSPGLQLEATVSTGPVLDSRDCLPPVMPDECPQAQPTNNPNQLLLVSPGALVVCGSVHQGVCEQRRLGQLEQLLLRPERPGDTQYVAANDPAVSTVGLVAQGLAGEPLLFVGRGYTSRGVGGGIPPITTRALWPPDPQAAFSYEETAKLAVGRLSEYSHHFVSAFARGASAYFLFLRRDLQAQSRAFRAYVSRVCLRDQHYYSYVELPLACEGGRYGLIQAAAVATSREVAHGEVLFAAFSSAAPPTVGRPPSAAAGASGASALCAFPLDEVDRLANRTRDACYTREGRAEDGTEVAYIEYDVNSDCAQLPVDTLDAYPCGSDHTPSPMASRVPLEATPILEWPGIQLTAVAVTMEDGHTIAFLGDSQGQLHRVYLGPGSDGHPYSTQSIQQGSAVSRDLTFDGTFEHLYVMTQSTLLKVPVASCAQHLDCASCLAHRDPYCGWCVLLGRCSRRSECSRGQGPEQWLWSFQPELGCLQVAAMSPANISREETREVFLSVPDLPPLWPGESYSCHFGEHQSPALLTGSGVMCPSPDPSEAPVLPRGADYVSVSVELRFGAVVIAKTSLSFYDCVAVTELRPSAQCQACVSSRWGCNWCVWQHLCTHKASCDAGPMVASHQSPLVSPDPPARGGPSPSPPTAPKALATPAPDTLPVEPGAPSTATASDISPGASPSLLSPWGPWAGSGSISSPGSTGSPLHEEPSPPSPQNGPGTAVPAPTDFRPSATPEDLLASPLSPSEVAAVPPADPGPEALHPTVPLDLPPATVPATTFPGAMGSVKPALDWLTREGGELPEADEWTGGDAPAFSTSTLLSGDGDSAELEGPPAPLILPSSLDYQYDTPGLWELEEATLGASSCPCVESVQGSTLMPVHVEREIRLLGRNLHLFQDGPGDNECVMELEGLEVVVEARVECEPPPDTQCHVTCQQHQLSYEALQPELRVGLFLRRAGRLRVDSAEGLHVVLYDCSVGHGDCSRCQTAMPQYGCVWCEGERPRCVTREACGEAEAVATQCPAPLIHSVEPLTGPVDGGTRVTIRGSNLGQHVQDVLGMVTVAGVPCAVDAQEYEVSSSLVCITGASGEEVAGATAVEVPGRGRGVSEHDFAYQDPKVHSIFPARGPRAGGTRLTLNGSKLLTGRLEDIRVVVGDQPCHLLPEQQSEQLRCETSPRPTPATLPVAVWFGATERRLQRGQFKYTLDPNITSAGPTKSFLSGGREICVRGQNLDVVQTPRIRVTVVSRMLQPSQGLGRRRRVVPETACSLGPSCSSQQFEEPCHVNSSQLITCRTPALPGLPEDPWVRVEFILDNLVFDFATLNPTPFSYEADPTLQPLNPEDPTMPFRHKPGSVFSVEGENLDLAMSKEEVVAMIGDGPCVVKTLTRHHLYCEPPVEQPLPRHHALREAPDSLPEFTVQMGNLRFSLGHVQYDGESPGAFPVAAQVGLGVGTSLLALGVIIIVLMYRRKSKQALRDYKKVQIQLENLESSVRDRCKKEFTDLMTEMTDLTSDLLGSGIPFLDYKVYAERIFFPGHRESPLHRDLGVPESRRPTVEQGLGQLSNLLNSKLFLTKFIHTLESQRTFSARDRAYVASLLTVALHGKLEYFTDILRTLLSDLVAQYVAKNPKLMLRRTETVVEKLLTNWMSICLYTFVRDSVGEPLYMLFRGIKHQVDKGPVDSVTGKAKYTLNDNRLLREDVEYRPLTLNALLAVGPGAGEAQGVPVKVLDCDTISQAKEKMLDQLYKGVPLTQRPDPRTLDVEWRSGVAGHLILSDEDVTSEVQGLWRRLNTLQHYKVPDGATVALVPCLTKHVLRENQDYVPGERTPMLEDVDEGGIRPWHLVKPSDEPEPPRPRRGSLRGGERERAKAIPEIYLTRLLSMKGTLQKFVDDLFQVILSTSRPVPLAVKYFFDLLDEQAQQHGISDQDTIHIWKTNSLPLRFWINIIKNPQFVFDVQTSDNMDAVLLVIAQTFMDACTLADHKLGRDSPINKLLYARDIPRYKRMVERYYADIRQTVPASDQEMNSVLAELSWNYSGDLGARVALHELYKYINKYYDQIITALEEDGTAQKMQLGYRLQQIAAAVENKVTDL

SEQ ID NO: 68070 - protein, 320 aa, Homo sapiens
LVAALLLGSACCGSAQLLFNKTKSVEFTFCNDTVVIPCFVTNMEAQNTTEVYVKWKFKGRDIYTFDGALNKSTVPTDFSSAKIEVSQLLKGDASLKMDKSDAVSHTGNYTCEVTELTREGETIIELKYRVVSWFSPNENILIVIFPIFAILLFWGQFGIKTLKYRSGGMDEKTIALLVAGLVITVIVIVGAILFVPGEYSLKNATGLGLIVTSTGILILLHYYVFSTAIGLTSFVIAILVIQVIAYILAVVGLSLCIAACIPMHGPLLISGLSILALAQLLGLVYMKFVASNQKTIQPPRKAVEEPLNAFKESKGMMNDE

SEQ ID NO: 68071 - protein, 18 aa, Homo sapiens
IYFLMIHVLLILCFTGHL

SEQ ID NO: 68072 - protein, 18 aa, Homo sapiens
KHLHSKGFLVFAGCLMKL

SEQ ID NO: 68073 - protein, 80 aa, Homo sapiens
LILRRHGNLFITLFALMLTAGLPELTSVKDIQYLKDSLALGKSEEEALKQFKQKFDEALRESWTTKVNWMAHTVRKDYRS

SEQ ID NO: 68074 - protein, 31 aa, Homo sapiens
LLVWSLVTARLPRSLLVSSPGVPRGLEEAAA

SEQ ID NO: 68075 - protein, 292 aa, Homo sapiens
IGSAGLNLFWKLCVTVMRLVILDNYDLASEWAAKYICNRIIQFKPGQDRYFTLGLPTGSTPLGCYKKLIEYHKNGHLSFKYVKTFNMDEYVGLPRNHPESYHSYMWNNFFKHIDIDPNNAHILDGNAADLQAECDAFENKIKEAGGIDLFVGGIGPDGHIAFNEPGSSLVSRTRLKTLAMDTILANAKYFDGDLSKVPTMALTVGVGTVMDAREVMILITGAHKAFALYKAIEEGVNHMWTVSAFQQHPRTIFVCDEDATLELRVKTVKYFKGLMHVHNKLVDPLFSMKDGN

SEQ ID NO: 68076 - protein, 431 aa, Homo sapiens
KVSAVLCVCAAAWCSQSLAAAAAVAAAGGRSDGGNFLDDKQWLTTISQYDKEVGQWNKFRDDDYFRTWSPGKPFDQALDPAKDPCLKMKCSRHKVCIAQDSQTAVCISHRRLTHRMKEAGVDHRQWRGPILSTCKQCPVVYPSPVCGSDGHTYSFQCKLEYQACVLGKQISVKCEGHCPCPSDKPTSTSRNVKRACSDLEFREVANRLRDWFKALHESGSQNKKTKTLLRPERSRFDTSILPICKDSLGWMFNRLDTNYDLLLDQSELRSIYLDKNEQCTKAFFNSCDTYKDSLISNNEWCYCFQRQQDPPCQTELSNIQKRQGVKKLLGQYIPLCDEDGYYKPTQCHGSVGQCWCVDRYGNEVMGSRINGVADCAIDFEISGDFASGDFHEWTDDEDDEDDIMNDEDEIEDDDEDEGDDDDGGDDHDVYI

SEQ ID NO: 68077 - protein, 37 aa, Homo sapiens
IPRCWVSVPGWVLVCALLLPIPLPPRIKEEPGGVLRK

SEQ ID NO: 68078 - protein, 85 aa, Homo sapiens
IALLQIFGICLAQNLVSDIKAVKANWSKWNDDFENHWLTPTISEVLSTAGPQQNSLTGAPGPAPPSRHVFFGLGGLYPEPTFKNW

SEQ ID NO: 68079 - protein, 1029 aa, Homo sapiens
RSEALLLYFTLLHFAGAGFPEDSEPISISHGNYTKQYPVFVGHKPGRNTTQRHRLDIQMIMIMNGTLYIAARDHIYTVDIDTSHTEEIYCSKKLTWKSRQADVDTCRMKGKHKDECHNFIKVLLKKNDDALFVCGTNAFNPSCRNYKMDTLEPFGDEFSGMARCPYDAKHANVALFADGKLYSATVTDFLAIDAVIYRSLGESPTLRTVKHDSKWLKEPYFVQAVDYGDYIYFFFREIAVEYNTMGKVVFPRVAQVCKNDMGGSQRVLEKQWTSFLKARLNCSVPGDSHFYFNILQAVTDVIRINGRDVVLATFSTPYNSIPGSAVCAYDMLDIASVFTGRFKEQKSPDSTWTPVPDERVPKPRPGCCAGSSSLERYATSNEFPDDTLNFIKTHPLMDEAVPSIFNRPWFLRTMVRYRLTKIAVDTAAGPYQNHTVVFLGSEKGIILKFLARIGNSGFLNDSLFLEEMSVYNSEKCSYDGVEDKRIMGMQLDRASSSLYVAFSTCVIKVPLGRCERHGKCKKTCIASRDPYCGWIKEGGACSHLSPNSRLTFEQDIERGNTDGLGDCHNSFVALNGHSSSLLPSTTTSDSTAQEGYESRGGMLDWKHLLDSPDSTDPLGAVSSHNHQDKKGVIRESYLKGHDQLVPVTLLAIAVILAFVMGAVFSGITVYCVCDHRRKDVAVVQRKEKELTHSRRGSMSSVTKLSGLFGDTQSKDPKPEAILTPLMHNGKLATPGNTAKMLIKADQHHLDLTALPTPESTPTLQQKRKPSRGSREWERNQNLINACTKDMPPMGSPVIPTDLPLRASPSHIPSVVVLPITQQGYQHEYVDQPKMSEVAQMALEDQAATLEYKTIKEHLSSKSPNHGVNLVENLDSLPPKVPQREASLGPPGASLSQTGLSKRLEMHHSSSYGVDYKRSYPTNSLTRSHQATTLKRNNTNSSNSSHLSRNQSFGRGDNPPPAPQRVDSIQVHSSQPSGQAVTVSRQPSLNAYNSLTRSGLKRTPSLKPDVPPKPSFAPLSTSMKPNDACT

SEQ ID NO: 68080 - protein, 531 aa, Homo sapiens
VSALLMAWFGVLSCVQAEFFTSIGHMTDLIYAEKELVQSLKEYILVEEAKLSKIKSWANKMEALTSKSAADAEGYLAHPVNAYKLVKRLNTDWPALEDLVLQDSAAGFIANLSVQRQFFPTDEDEIGAAKALMRLQDTYRLDPGTISRGELPGTKYQAMLSVDDCFGMGRSAYNEGDYYHTVLWMEQVLKQLDAGEEATTTKSQVLDYLSYAVFQLGDLHRALELTRRLLSLDPSHERAGGNLRYFEQLLEEEREKTLTNQTEAELATPEGIYERPVDYLPERDVYESLCRGEGVKLTPRRQKRLFCRYHHGNRAPQLLIAPFKEEDEWDSPHIVRYYDVMSDEEIERIKEIAKPKLARATVRDPKTGVLTVASYRVSKSSWLEEDDDPVVARVNRRMQHITGLTVKTAELLQVANYGVGGQYEPHFDFSRNDERDTFKHLGTGNRVATFLNYMSDVEAGGATVFPDLGAAIWPKKGTAVFWYNLLRSGEGDYRTRHAACPVLVGCKWVSNKWFHERGQEFLRPCGSTEVD

SEQ ID NO: 68081 - protein, 306 aa, Homo sapiens
IPRTMCAERLGQFMTLALVLATFDPARGTDATNPPEGPQDRSSQQKGRLSLQNTAEIQHCLVNAGDVGCGVFECFENNSCEIRGLHGICMTFLHNAGKFDAQGKSFIKDALKCKAHALRHRFGCISRKCPAIREMVSQLQRECYLKHDLCAAAQENTRVIVEMIHFKDLLLHEPYVDLVNLLLTCGEEVKEAITHSVQVQCEQNWGSLCSILSFCTSAIQKPPTAPPERQPQVDRTKLSRAHHGEAGHHLPEPSSRETGRGAKGERGSKSHPNAHARGRVGGLGAQGPSGSSEWEDEQSEYSDIRR

SEQ ID NO: 68082 - protein, 231 aa, Homo sapiens
LALLLVSAALSSVVSRTDSPSPTVLNSHISTPNVNALTHENQTKPSISQISTTLPPTTSTKKSGGASVVPHPSPTPLSQEEADNNEDPSIEEEDLLMLNSSPSTAKDTLDNGDYGEPDYDWTTGPRDDDESDDTLEENRGYMEIEQSVKSFKMPSSNIEEEDSHFFFHLIIFAFCIAVVYITYHNKRKIFLLVQSRKWRDGLCSKTVEYHRLDQNVNEAMPSLKITNDYIF

SEQ ID NO: 68083 - protein, 715 aa, Homo sapiens
LRLALVQLLGLAVDLCGAALAPHLDDALRALRCSLLDPFAAVRRESCSCAAALAQATPDHFHMQSESLIGPLMQTISHQHWKVRVAAIEATGAVIHFGNGKSVDDVLSHFAQRLFDDVPQVRRAVASVVGGWLLCLRDRYSFFHKLIPLLLSSLNDEVPEVRQLAASLWEDVGLQWQKENEEDLKDKLDFAPPTPPHYPPHERRPVLGCRELVFRNLSKILPALCHDITDWVVGTRVKSAQLLPVLLLHAEDHATQHLEVVLRTLFQACTDEEAAVVQSCTRSAELVGTFVSPEVFLKLILSTLKKTPSASGLLVLASAMRGCPREALQPHLAAIATELAQAHICQASENDLYLERLLLCVQALVSVCHEDCGVASLQLLDVLLTIVALAGATGLRDKAQETMDSLAMVEGVSSCQDLYRKHIGPLLERVTASHLDWTAHSPELLQFSVIVAQSGPALGEALPHVVPTLRACLQPSQDPQMRLKLFSILSTVLLRATDTINSQGQFPSYLETVTKDILAPNLQWHAGRTAAAIRTAAVSCLWALTSSEVLSAEQIRDVQETLMPQVLTTLEEDSKMTRLISCRIINTFLKTSGGMTDPEKLIRIYPELLKRLDDVSNDVRMAAASTLVTWLQCVKGANAKSYYQSSVQYLYRELLVHLDDPERAIQDAILEVLKEGSGLFPDLLVRETEAVIHKHRSATYCEQLLQHVQAVPATQ

SEQ ID NO: 68084 - protein, 51 aa, Homo sapiens
MLWILRRSTNWTLYLILHGCPAVVCAWPRQHAPWGMVRLWVPTAAPAALSP

SEQ ID NO: 68085 - protein, 23 aa, Homo sapiens
ITAGLLMLYARRKRARDNLVLDN

SEQ ID NO: 68086 - protein, 289 aa, Homo sapiens
KKRWSVLAAAGLRGLVRLLHVRAGFCCGVIRAHKKAIATLCFSPAHETHLFTASYDKRIILWDIGVPNQDYEFQASQLLTLDTTSIPLRLCPVASCPDARLLAGCEGGCCCWDVRLDQPQKRRVCEVEFVFSEGSEASGRRVDGLAFVNEDIVASKGSGLGTICLWSWRQTWGGRGSQSTVAVVVLARLQWSSTELAYFSLSACPDKGIVLCGDEEGNVWLYDVSNILKQPPLLPAALQAPTQILKWPQPWALGQVVTKTMVNTVVANASFTYLTALTDSNIVAIWGRM

SEQ ID NO: 68087 - protein, 1407 aa, Homo sapiens
KAPAVLAPGILVLLFTLVQRSNGECKEALAKSEMNVNMKYQLPNFTAETPIQNVILHEHHIFLGATNYIYVLNEEDLQKVAEYKTGPVLEHPDCFPCQDCSSKANLSGGVWKDNINMALVVDTYYDDQLISCGSVNRGTCQRHVFPHNHTADIQSEVHCIFSPQIEEPSQCPDCVVSALGAKVLSSVKDRFINFFVGNTINSSYFPDHPLHSISVRRLKETKDGFMFLTDQSYIDVLPEFRDSYPIKYVHAFESNNFIYFLTVQRETLDAQTFHTRIIRFCSINSGLHSYMEMPLECILTEKRKKRSTKKEVFNILQAAYVSKPGAQLARQIGASLNDDILFGVFAQSKPDSAEPMDRSAMCAFPIKYVNDFFNKIVNKNNVRCLQHFYGPNHEHCFNRTLLRNSSGCEARRDEYRTEFTTALQRVDLFMGQFSEVLLTSISTFIKGDLTIANLGTSEGRFMQVVVSRSGPSTPHVNFLLDSHPVSPEVIVEHTLNQNGYTLVITGKKITKIPLNGLGCRHFQSCSQCLSAPPFVQCGWCHDKCVRSEECLSGTWTQQICLPAIYKVFPNSAPLEGGTRLTICGWDFGFRRNNKFDLKKTRVLLGNESCTLTLSESTMNTLKCTVGPAMNKHFNMSIIISNGHGTTQYSTFSYVDPVITSISPKYGPMAGGTLLTLTGNYLNSGNSRHISIGGKTCTLKSVSNSILECYTPAQTISTEFAVKLKIDLANRETSIFSYREDPIVYEIHPTKSFISTWWKEPLNIVSFLFCFASGGSTITGVGKNLNSVSVPRMVINVHEAGRNFTVACQHRSNSEIICCTTPSLQQLNLQLPLKTKAFFMLDGILSKYFDLIYVHNPVFKPFEKPVMISMGNENVLEIKGNDIDPEAVKGEVLKVGNKSCENIHLHSEAVLCTVPNDLLKLNSELNIEWKQAISSTVLGKVIVQPDQNFTGLIAGVVSISTALLLLLGFFLWLKKRKQIKDLGSELVRYDARVHTPHLDRLVSARSVSPTTEMVSNESVDYRATFPEDQFPNSSQNGSCRQVQYPLTDMSPILTSGDSDISSPLLQNTVHIDLSALNPELVQAVQHVVIGPSSLIVHFNEVIGRGHFGCVYHGTLLDNDGKKIHCAVKSLNRITDIGEVSQFLTEGIIMKDFSHPNVLSLLGICLRSEGSPLVVLPYMKHGDLRNFIRNETHNPTVKDLIGFGLQVAKGMKYLASKKFVHRDLAARNCMLDEKFTVKVADFGLARDMYDKEYYSVHNKTGAKLPVKWMALESLQTQKFTTKSDVWSFGVLLWELMTRGAPPYPDVNTFDITVYLLQGRRLLQPEYCPDPLYEVMLKCWHPKAEMRPSFSELVSRISAIFSTFIGEHYVHVNATYVNVKCVAPYPSLLSSEDNADDEVDTRPASFWETS

SEQ ID NO: 68088 - protein, 23 aa, Homo sapiens
RWRCRRSTPQAQIPALLLASCLG

SEQ ID NO: 68089 - protein, 811 aa, Homo sapiens
LGLSFSWVLLALALLAWCRRSRGLKALRLCRALALLEDEERVVRLGVRACDLPAWVHFPDTERAEWLNKTVKHMWPFICQFIEKLFRETIEPAVRGANTHLSTFSFTKVDVGQQPLRINGVKVYTENVDKRQIILDLQISFVGNCEIDLEIKRYFCRAGVKSIQIHGTMRVILEPLIGDMPLVGALSIFFLRKPLLEINWTGLTNLLDVPGLNGLSDTIILDIISNYLVLPNRITVPLVSEVQIAQLRFPVPKGVLRIHFIEAQDLQGKDTYLKGLVKGKSDPYGIIRVGNQIFQSRVIKENLSPKWNEVYEALVYEHPGQELEIELFDEDPDKDDFLGSLMIDLIEVEKERLLDEWFTLDEVPKGKLHLRLEWLTLMPNASNLDKVLTDIKADKDQANDGLSSALLILYLDSARNLPSNPLEFNPDVLKKTAVQRALKSGKKISSNPNPVVQMSVGHKAQESKIRYKTNEPVWEENFTFFIHNPKRQDLEVEVRDEQHQCSLGNLKVPLSQLLTSEDMTVSQRFQLSNSGPNSTIKMKIALRVLHLEKRERPPDHQHSAQVKRPSVSKEGRKTSIKSHMSGSPGPGGSNTAPSTPVIGGSDKPGMEEKAQPPEAGPQGLHDLGRSSSSLLASPGHISVKEPTPSIASDISLPIATQELRQRLRQLENGTTLGQSPLGQIQLTIRHSSQRNKLIVVVHACRNLIAFSEDGSDPYVRMYLLPDKRRSGRRKTHVSKKTLNPVFDQSFDFSVSLPEVQRRTLDVAVKNSGGFLSKDKGLLGKVLVALASEELAKGWTQWYDLTEDGTRPQAMT

SEQ ID NO: 68090 - protein, 319 aa, Homo sapiens
VRVEGWKVPTSRCRFLLARVLGYLVVMEAVLTEELDEEEQLLRRHRKEKKELQAKIQGMKNAVPKNDKKRRKQLTEDVAKLEKEMEQKHREELEQLKLTTKENKIDSVAVNISNLVLENQPPRISKAQKRREKKAALEKEREERIAEAEIENLTGARHMESEKLAQILAARQLEIKQIPSDGHCMYKAIEDQLKEKDCALTVVALRSQTAEYMQSHVEDFLPFLTNPNTGDMYTPEEFQKYCEDIVNTAAWGGQLELRALSHILQTPIEIIQADSPPIIVGEEYSKKPLILVYMRHAYGLGEHYNSVTRLVNIVTENCS

SEQ ID NO: 68091 - protein, 59 aa, Homo sapiens
TANTYGMWGGAMLGVAGLLSRLEEDRLLLLPKEDVCRWALAVGSWAYCRALHTQRLQWE

SEQ ID NO: 68092 - protein, 15 aa, Homo sapiens
LMSFFLLASLTDLLP

SEQ ID NO: 68093 - protein, 48 aa, Homo sapiens
KAFSQRMEVAALLVFRTCWIRSLCVWPQPLETSYSAVSAHNSWSVLGV

SEQ ID NO: 68094 - protein, 213 aa, Homo sapiens
IGAGALGAAALALLLANTDVFLSKPQKAALEYLEDIDLKTLEKEPRTFKAKELWEKNGAVIMAVRRPGCFLCREEAADLSSLKSMLDQLGVPLYAVVKEHIRTEVKDFQPYFKGEIFLDEKKKFYGPQRRKMMFMGFIRLGVWYNFFRAWNGGFSGNLEGEGFILGGVFVVGSGKQGILLEHREKEFGDKVNLLSVLEAAKMIKPQTLASEKK

SEQ ID NO: 68095 - protein, 23 aa, Homo sapiens
VGLVGFCLVFATPLCCALFPQKR

SEQ ID NO: 68096 - protein, 19 aa, Homo sapiens
LHWTVGILVSACVSTAARG

SEQ ID NO: 68097 - protein, 11 aa, Homo sapiens
IFVFVLSIHLL

SEQ ID NO: 68098 - protein, 502 aa, Homo sapiens
LTLLLLLLAGDRASSNPNATSSSSQDPESLQDRGEGKVATTVISKMLFVEPILEVSSLPTTNSTTNSATKITANTTDEPTTQPTTEPTTQPTIQPTQPTTQLPTDSPTQPTTGSFCPGPVTLCSDLESHSTEAVLGDALVDFSLKLYHAFSAMKKVETNMAFSPFSIASLLTQVLLGAGENTKTNLESILSYPKDFTCVHQALKGFTTKGVTSVSQIFHSPDLAIRDTFVNASRTLYSSSPRVLSNNSDANLELINTWVAKNTNNKISRLLDSLPSDTRLVLLNAIYLSEQPSHLFPLAKWKTTFDPKKTRMEPFHFKNSVIKVPMMNSKKYPVAHFIDQTLKAKVGQLQLSHNLSLVILVPQNLKHRLEDMEQALSPSVFKAIMEKLEMSKFQPTLLTLPRIKVTTSQDMLSIMEKLEFFDFSYDLNLCGLTEDPDLQVSAMQHQTVLELTETGVEAAAASAISVARTLLVFEVQQPFLFVLWDQQHKFPVFMGRVYDPRA

SEQ ID NO: 68099 - protein, 38 aa, Homo sapiens
LLGFLALLALMSRLGRAAADSDPNLDPLMNPHIRVGPS

SEQ ID NO: 68100 - protein, 20 aa, Homo sapiens
LKTSLPRVLASLPVYLLVGL

SEQ ID NO: 68101 - protein, 746 aa, Homo sapiens
LLLVGLTAPALALAGYIEALAANAGTGFAVAEPQIAMFCGKLNMHVNIQTGKWEPDPTGTKSCFETKEEVLQYCQEMYPELQITNVMEANQRVSIDNWCRRDKKQCKSRFVTPFKCLVGEFVSDVLLVPEKCQFFHKERMEVCENHQHWHTVVKEACLTQGMTLYSYGMLLPCGVDQFHGTEYVCCPQTKIIGSVSKEEEEEDEEEEEEEDEEEDYDVYKSEFPTEADLEDFTEAAVDEDDEDEEEGEEVVEDRDYYYDTFKGDDYNEENPTEPGSDGTMSDKEITHDVKAVCSQEAMTGPCRAVMPRWYFDLSKGKCVRFIYGGCGGNRNNFESEDYCMAVCKAMIPPTPLPTNDVDVYFETSADDNEHARFQKAKEQLEIRHRNRMDRVKKEWEEAELQAKNLPKAERQTLIQHFQAMVKALEKEAASEKQQLVETHLARVEAMLNDRRRMALENYLAALQSDPPRPHRILQALRRYVRAENKDRLHTIRHYQHVLAVDPEKAAQMKSQVMTHLHVIEERRNQSLSLLYKVPYVAQEIQEEIDELLQEQRADMDQFTASISETPVDVRVSSEESEEIPPFHPFHPFPALPENEDTQPELYHPMKKGSGVGEQDGGLIGAEEKVINSKNKVDENMVIDETLDVKEMIFNAERVGGLEEERESVGPLREDFSLSSSALIGLLVIAVAIATVIVISLVMLRKRQYGTISHGIVEVDPMLTPEERHLNKMQNHGYENPTYKYLEQMQI

SEQ ID NO: 68102 - protein, 734 aa, Homo sapiens
LLLVGLTAPALALAGYIEALAANAGTGFAVAEPQIAMFCGKLNMHVNIQTGKWEPDPTGTKSCFETKEEVLQYCQEMYPELQITNVMEANQRVSIDNWCRRDKKQCKSRFVTPFKCLVGEFVSDVLLVPEKCQFFHKERMEVCENHQHWHTVVKEACLTQGMTLYSYGMLLPCGVDQFHGTEYVCCPQTKIIGSVSKEEEEEDEEEEEEEDEEEDYDVYKSEFPTEADLEDFTEAAVDEDDEDEEEGEEVVEDRDYYYDTFKGDDYNEENPTEPGSDGTMSDKEITHDVKAVCSQEAMTGPCRAVMPRWYFDLSKGKCVRFIYGGCGGNRNNFESEDYCMAVCKAMIPPTPLPTNDVDVYFETSADDNEHARFQKAKEQLEIRHRNRMDRVKKEWEEAELQAKNLPKAERQTLIQHFQAMVKALEKEAASEKQQLVETHLARVEAMLNDRRRMALENYLAALQSDPPRPHRILQALRRYVRAENKDRLHTIRHYQHVLAVDPEKAAQMKSQVMTHLHVIEERRNQSLSLLYKVPYVAQEIQEEIDELLQEQRADMDQFTASISETPVDVRVSSEESEEIPPFHPFHPFPALPENEGSGVGEQDGGLIGAEEKVINSKNKVDENMVIDETLDVKEMIFNAERVGGLEEERESVGPLREDFSLSSSALIGLLVIAVAIATVIVISLVMLRKRQYGTISHGIVEVDPMLTPEERHLNKMQNHGYENPTYKYLEQMQI

SEQ ID NO: 68103 - protein, 53 aa, Homo sapiens
KSSLLLLLLLLLLRVPASSCQGGQPASSRRGARELKESQFPQNCCSEKRSLLL

SEQ ID NO: 68104 - protein, 488 aa, Homo sapiens
LLLSFLAPWATIALRPALRALGSLHLPTNPTSLPAVAKNYSVLYFQQKVDHFGFNTVKTFNQRYLVADKYWKKNGGSILFYTGNEGDIIWFCNNTGFMWDVAEELKAMLVFAEHRYYGESLPFGDNSFKDSRHLNFLTSEQALADFAELIKHLKRTIPGAENQPVIAIGGSYGGMLAAWFRMKYPHMVVGALAASAPIWQFEDLVPCGVFMKIVTTDFRKSGPHCSESIHRSWDAINRLSNTGSGLQWLTGALHLCSPLTSQDIQHLKDWISETWVNLAMVDYPYASNFLQPLPAWPIKVVCQYLKNPNVSDSLLLQNIFQALNVYYNYSGQVKCLNISETATSSLGTLGWSYQACTEVVMPFCTNGVDDMFEPHSWNLKELSDDCFQQWGVRPRPSWITTMYGGKNISSHTNIVFSNGELDPWSGGGVTKDITDTLVAVTISEGAHHLDLRTKNALDPMSVLLARSLEVRHMKNWIRDFYDSAGKQH

SEQ ID NO: 68105 - protein, 299 aa, Homo sapiens
LALTSPPGMALAALMIALGSLGLHTWQAQAVPILPLGLAPDTFDDTYVGCAEEMEEKAAPLLKEEMAHHALLRESWEAAQETWEDKRRGLTLPPGFKAQNGIAIMVYTNSSNTLYWELNQAVRTGGGSRELYMRHFPFKALHFYLIRALQLLRGSGGCSRGPGEVVFRGVGSLRFEPKRLGDSVRLGQFASSSLDKAVAHRFGNATLFSLTTCFGAPIQAFSVFPKEREVLIPPHEVFLVTRFSQDGAQSLVTLWSYNQTCSHFNCAYLGGEKRRGCVSAPGALGTGDLHMTKRHLQQP

SEQ ID NO: 68106 - protein, 41 aa, Homo sapiens
VIFSAMFGGYSLYYFNRKTFSFVMPSLVEEIPLDKDDLGEP

SEQ ID NO: 68107 - protein, 130 aa, Homo sapiens
ILGLVFIFQFVISCSCLAINRSKQTDVINASWWVMSNKTRDELERSFDCCGLFNLTTLYQQDYDFCTAICKSQSPTCQMCGEKFLKHSDEALKILGGVGLFFSFTEILGVWLAMRFRNQKDPRANPSAFL

SEQ ID NO: 68108 - protein, 431 aa, Homo sapiens
TLLSMVLGSLLALLLPLGAVEEQCLAVLKGLYLLRSKPDRAQHAATKCTSPSTELSITSRGATLLVAKTKASPAGKLEARAALNQALEMKRQGKREKAQKLFMHALKMDPDFVDALTEFGIFSEEDKDIIQADYLYTRALTISPYHEKALVNRDRTLPLVEEIDQRYFSIIDSKVKKVMSIPKGNSALRRVMEETYYHHIYHTVAIEGNTLTLSEIRHILETRYAVPGKSLEEQNEVIGMHAAMKYINTTLVSRIGSVTISDVLEIHRRVLGYVDPVEAGRFRTTQVLVGHHIPPHPQDVEKQMQEFVQWLNSEEAMNLHPVEFAALAHYKLVYIHPFIDGNGRTSRLLMNLILMQAGYPPITIRKEQRSDYYHVLEAANEGDVRPFIRFIAKCTETTLDTLLFATTEYSVALPEAQPNHSGFKETLPVKP

SEQ ID NO: 68109 - protein, 277 aa, Homo sapiens
LPFLMKKTQTWILTCIYLQLLLFNPLVKTEGICRNRVTNNVKDVTKLVANLPKDYMITLKYVPGMDVLPSHCWISEMVVQLSDSLTDLLDKFSNISEGLSNYSIIDKLVNIVDDLVECVKENSSKDLKKSFKSPEPRLFTPEEFFRIFNRSIDAFKDFVVASETSDCVVSSTLSPEKDSRVSVTKPFMLPPVAASSLRNDSSSSNRKAKNPPGDSSLHWAAMALPALFSLIIGFAFGALYWKKRQPSLTRAVENIQINEEDNEISMLQEKEREFQEV

SEQ ID NO: 68110 - protein, 54 aa, Homo sapiens
MVMIMASVGFVWSSPGLMEVGVGGPVVGGMGLLQEDLISEFLFQDFLRQAAGRT

SEQ ID NO: 68111 - protein, 46 aa, Homo sapiens
LRWALSVLCVLLMAETVSGTRGSSTGAHISPQFPASVPQGVWPECL

SEQ ID NO: 68112 - protein, 12 aa, Homo sapiens
LAYFFLLGSILI

SEQ ID NO: 68113 - protein, 34 aa, Homo sapiens
LLLVLAVGLAVFFFRRHGTPRRLLYCQRSLLDKV

SEQ ID NO: 68114 - protein, 152 aa, Homo sapiens
IIAVAVMYLAGRLCKFEIQEWTSKPMYRRWWEQFVQDVPVDVLEDICHQILDLYSQGKQQMPHHTPHQLQQPPSLQPTPQVPQVQQSQPSQSSEPSQPQQKDPQQPAQQQQPAQQPKKPSPQPSSPRQVKRAVVSGLKQALGRAGFPGGGNT

SEQ ID NO: 68115 - protein, 41 aa, Homo sapiens
IPTLLYGLGSWLFARVTETVHTSYGPITVYFLNKEDEGAMY

SEQ ID NO: 68116 - protein, 565 aa, Homo sapiens
VESGVLVGVVCLLLACPATATGPEVAQPEVDTTLGRVRGRQVGVKGTDRLVNVFLGIPFAQPPLGPDRFSAPHPAQPWEGVRDASTAPPMCLQDVESMNSSRFVLNGKQQIFSVSEDCLVLNVYSPAEVPAGSGRPVMVWVHGGALITGAATSYDGSALAAYGDVVVVTVQYRLGVLGFFSTGDEHAPGNQGFLDVVAALRWVQENIAPFGGDLNCVTVFGGSAGGSIISGLVLSPVAAGLFHRAITQSGVITTPGIIDSHPWPLAQKIANTLACSSSSPAEMVQCLQQKEGEELVLSKKLKNTIYPLTVDGTVFPKSPKELLKEKPFHSVPFLMGVNNHEFSWLIPRGWGLLDTMEQMSREDMLAISTPVLTSLDVPPEMMPTVIDEYLGSNSDAQAKCQAFQEFMGDVFINVPTVSFSRYLRDSGSPVFFYEFQHRPSSFAKIKPAWVKADHGAEGAFVFGGPFLMDESSRLAFPEATEEEKQLSLTMMAQWTHFARTGDPNSKALPPWPQFNQAEQYLEINPVPRAGQKFREAWMQFWSETLPSKIQQWHQKQKNRKAQEDL

SEQ ID NO: 68117 - protein, 16 aa, Homo sapiens
RCWMWKRMGVWLMHMA

SEQ ID NO: 68118 - protein, 115 aa, Homo sapiens
KLYHKKIFRTAMLFQFVNVLLQVLVHKSHDLLQEEIGIAIYNMASVDFDGFFAAFLPEFLTSCDGVDANQKSVLGRNFKMDRDLPSFTQNVHRLVNDLRYYRLCNDSLPPGTVKL

SEQ ID NO: 68119 - protein, 606 aa, Homo sapiens
LLPKDRGVGRRQTMWTLVSWVALTAGLVAGTRCPDGQFCPVACCLDPGGASYSCCRPLLDKWPTTLSRHLGGPCQVDAHCSAGHSCIFTVSGTSSCCPFPEAVACGDGHHCCPRGFHCSADGRSCFQRSGNNSVGAIQCPDSQFECPDFSTCCVMVDGSWGCCPMPQASCCEDRVHCCPHGAFCDLVHTRCITPTGTHPLAKKLPAQRTNRAVALSSSVMCPDARSRCPDGSTCCELPSGKYGCCPMPNATCCSDHLHCCPQDTVCDLIQSKCLSKENATTDLLTKLPAHTVGDVKCDMEVSCPDGYTCCRLQSGAWGCCPFTQAVCCEDHIHCCPAGFTCDTQKGTCEQGPHQVPWMEKAPAHLSLPDPQALKRDVPCDNVSSCPSSDTCCQLTSGEWGCCPIPEAVCCSDHQHCCPQGYTCVAEGQCQRGSEIVAGLEKMPARRASLSHPRDIGCDQHTSCPVGQTCCPSLGGSWACCQLPHAVCCEDRQHCCPAGYTCNVKARSCEKEVVSAQPATFLARSPHVGVKDVECGEGHFCHDNQTCCRDNRQGWACCPYRQGVCCADRRHCCPAGFRCAARGTKCLRREAPRWDAPLRDPALRQLL

SEQ ID NO: 68120 - protein, 542 aa, Homo sapiens
TLCSVLLPVFITFWCSLQRSRRQLHRRDIFRKSKHGWRDTDLFSQPTYCCVCAQHILQGAFCDCCGLRVDEGCLRKADKRFQCKEIMLKNDTKVLDAMPHHWIRGNVPLCSYCMVCKQQCGCQPKLCDYRCIWCQKTVHDECMKNSLKNEKCDFGEFKNLIIPPSYLTSINQMRKDKKTDYEVLASKLGKQWTPLIILANSRSGTNMGEGLLGEFRILLNPVQVFDVTKTPPIKALQLCTLLPYYSARVLVCGGDGTVGWVLDAVDDMKIKGQEKYIPQVAVLPLGTGNDLSNTLGWGTGYAGEIPVAQVLRNVMEADGIKLDRWKVQVTNKGYYNLRKPKEFTMNNYFSVGPDALMALNFHAHREKAPSLFSSRILNKAVYLFYGTKDCLVQECKDLNKKVELELDGERVALPSLEGIIVLNIGYWGGGCRLWEGMGDETYPLARHDDGLLEVVGVYGSFHCAQIQVKLANPFRIGQAHTVRLILKCSMMPMQVDGEPWAQGPCTVTITHKTHAMMLYFSGEQTDDDISSTSDQEDIKATE

SEQ ID NO: 68121 - protein, 21 aa, Homo sapiens
LLSRQPRLRLKSASALICLSL

SEQ ID NO: 68122 - protein, 28 aa, Homo sapiens
VPSRFLTLLAHLVVVITLFWSRCPSSCH

SEQ ID NO: 68123 - protein, 38 aa, Homo sapiens
LNTCLTIFLATLAVVFHCFQRIKIASEIGDIFDLKGKT

SEQ ID NO: 68124 - protein, 34 aa, Homo sapiens
ILLFDAILTSATTGCLLLGALGEALLVFSERKSS

SEQ ID NO: 68125 - protein, 583 aa, Homo sapiens
ISAFLFTVTFAWCPPGLSNLTILSCPDHLSQDVFCLHESKFEEERMVAGWLTNYSQDSVTFEDVAVDFTQEEWTLLDQTQRNLYRDVMLENYKNLVAVDWESHINTKWSAPQQNFLQGKTSSVVEMERNHFGEELFDFNQCEKALSEHSCLKTHRRTYFRKKTCECNQCEKAFRKPSIFTLHKKTDIGEELPNCNQCETAFSQHLHLVCKKTSQNLHLVCKKTHTQEKPYKCSDCEKGLPSSSHLRECVRIYGGERPYTHKEYVETFSHSTALFVHMQTQDGEKFYECKACGKPFTESSYLTQHLRTHSRVLPIEHKKFGKAFAFSPDLAKHIRLRTRGKHYVCNECGKEFTCFSKLNIHIRVHTGEKPYECNKCGKAFTDSSGLIKHRRTHTGEKPYECKECGKAFANSSHLTVHMRTHTGEKPYQCKECGKAFINSSSFKSHMQTHPGVKPYDCQQCGKAFIRSSFLIRHLRSHSAERPFECEECGKAFRYSSHLSQHKRIHTGERPYKCQKCGQAFSISSGLTVHMRTHTGERPFECQECGKAFTRSTYLIRHLRSHSVEKPYKECGQTFSNSSCLTECV

SEQ ID NO: 68126 - protein, 73 aa, Homo sapiens
KTPTPALTFFAALGFHCSHVTPLAGGLSPSHPHSYTAFRGHFGQVLVDSPWERVPESLVRLHVEQRHQNMGLQ

SEQ ID NO: 68127 - protein, 42 aa, Homo sapiens
VLLIAWVVVGVSLQRRILTVKKQSGSRGPPLIPQGPDGGQRG

SEQ ID NO: 68128 - protein, 205 aa, Homo sapiens
LENMRGHPSLLLLYMALTTCLDTSPSEETDQEVFLGPPEAQSFLSSHTRIPRANHWDLELLTPGNLERECLEERCSWEEAREYFEDNTLTERFWESYIYNGKGGRGRVDVASLAVGLTGGILLIVLAGLGAFWYLRWRQHRGQQPCPQEAGLISPLSPLNPLGPPTPLPPPPPPPPGLPTYEQALAASGVHDAPPPPYTSLRRPH

SEQ ID NO: 68129 - protein, 463 aa, Homo sapiens
RPHLFQNLLLFLWALLNCGLGVSAQGPGEWTPWVSWTRCSSSCGRGVSVRSRRCLRLPGEEPCWGDSHEYRLCQLPDCPPGAVPFRDLQCALYNGRPVLGTQKTYQWVPFHGAPNQCDLNCLAEGHAFYHSFGRVLDGTACSPGAQGVCVAGRCLSAGCDGLLGSGALEDRCGRCGGANDSCLFVQRVFRDAGAFAGYWNVTLIPEGARHIRVEHRSRNHLALMGGDGRYVLNGHWVVSPPGTYEAAGTHVVYTRDTGPQETLQAAGPTSHDLLLQVLLQEPNPGIEFEFWLPRERYSPFQARVQALGWPLRQPQPRGVEPQPPAAPAVTPAQTPTLAPDPCPPCPDTRGRAHRLLHYCGSDFVFQARVLGHHHQAQETRYEVRIQLVYKNRSPLRAREYVWAPGHCPCPMLAPHRDYLMAVQRLVSPDGTQDQLLLPHAGYARPWSPAEDSRIRLTARRCPG

SEQ ID NO: 68130 - protein, 348 aa, Homo sapiens
TCRDPAHRSCPRDMGHPPLLPLLLLLHTCVPASWGLRCMQCKTNGDCRVEECALGQDLCRTTIVRLWEEGEELELVEKSCTHSEKTNRTLSYRTGLKITSLTEVVCGLDLCNQGNSGRAVTYSRSRYLECISCGSSDMSCERGRHQSLQCRSPEEQCLDVVTHWIQEGEEGRPKDDRHLRGCGYLPGCPGSNGFHNNDTFHFLKCCNTTKCNEGPILELENLPQNGRQCYSCKGNSTHGCSSEETFLIDCRGPMNQCLVATGTHEPKNQSYMVRGCATASMCQHAHLGDAFSMNHIDVSCCTKSGCNHPDLDVQYRSGAAPQPGPAHLSLTITLLMTARLWGGTLLWT

SEQ ID NO: 68131 - protein, 193 aa, Homo sapiens
LFALLLFFVGGVAESIRETEVIDPQDLLEGRYFSGALPDDEDVVGPGQESDDFELSGSGDLDDLEDSMIGPEVVHPLVPLDNHIPERAGSGSQVPTEPKKLEENEVIPKRISPVEESEDVSNKVSMSSTVQGSNIFERTEVLAALIVGGIVGILFAVFLILLLMYRMKKKDEGSYDLGKKPIYKKAPTNEFYA

SEQ ID NO: 68132 - protein, 14 aa, Homo sapiens
VCSLGIFMFVYFSL

SEQ ID NO: 68133 - protein, 467 aa, Homo sapiens
LYTLVLLLVPSVLDGGRDGDKGAEHCPGLQRSLGVWSLEAAAAGEREQGAEARAAEEGGANQSPRFPSNLSGAVGEAVSREKQHIYVHATWRTGSSFLGELFNQHPDVFYLYEPMWHLWQALYPGDAESLQGALRDMLRSLFRCDFSVLRLYAPPGDPAARAPDTANLTTAALFRWRTNKVICSPPLCPGAPRARAEVGLVEDTACERSCPPVAIRALEAECRKYPVVVIKDVRLLDLGVLVPLLRDPGLNLKVVQLFRDPRAVHNSRLKSRQGLLRESIQVLRTRQRGDRFHRVLLAHGVGARPGGQSRALPAAPRADFFLTGALEVICEAWLRDLLFARGAPAWLRRRYLRLRYEDLVRQPRAQLRRLLRFSGLRALAALDAFALNMTRGAAYGADRPFHLSARDAREAVHAWRERLSREQVRQVEAACAPAMRLLAYPRSGEEGDAEQPREGETPLEMDADGAT

SEQ ID NO: 68134 - protein, 37 aa, Homo sapiens
VMLRWEKLSWETLSLLVILAQLQCKSMLFLLSKRKET

SEQ ID NO: 68135 - protein, 68 aa, Homo sapiens
LLSLLVMVISPVIQLQPTFTPMRVALAGTFHYYSCERAKKAMGYQPLVTMDDAMERTVQSFRHLRRVK

SEQ ID NO: 68136 - protein, 42 aa, Homo sapiens
LERRLKKGQNRWGVRLLLVGGLPAFRASGGGEAAAPGSRHGE

SEQ ID NO: 68137 - protein, 188 aa, Homo sapiens
MTVVVLIGLTVRWTVSLNSYSGAGKPPMFGDYEAQRHWQEITFNLPVKQWYFNSSDNNLQYWGLDYPPLTAYHSLLCAYVAKFINPDWIALHTSRGYESQAHKLFMRTTVLIADLLIYIPAVVLYCCCLKEISTKKKIANALCILLYPGLILIDYGHFQWNFTTPCHFFAFYLASVLKKASKERGLCC

SEQ ID NO: 68138 - protein, 67 aa, Homo sapiens
MHIRNHPVPVIAMVNGLAAAAGCQLVASCDIAVASDKSSFATPGVNVGLFCSTPGVALARAVPRKVI

SEQ ID NO: 68139 - protein, 69 aa, Homo sapiens [sequence omitted]

SEQ ID NO: 68140 - protein, 43 aa, Homo sapiens
MAKHFILFTNLLFLSFPHWICQLPAFAGHLRSYRLACGNAEST

SEQ ID NO: 68141 - protein, 46 aa, Homo sapiens
MGLVVLKLFLRLLFKLASCSVLPIGVTRERLGGRRREYASCFFCSC

SEQ ID NO: 68142 - protein, 450 aa, Homo sapiens
MSTTIIAAVLGVILVLAIHPGNPKLKKQLGPGKKNDEVSSLDAFLDLIRNLFPENLVQACFQQIQTVTKKVLVAPPPDEEANATSAVVSLLNETVTEVPEETKMVIKKGLEFKDGMNVLGLIGFFIAFGIAMGKMGDQAKLMVDFFNILNEIVMKLVIMIMWYSPLGIACLICGKIIAIKDLEVVARQLGMYMVTVIIGLIIHGGIFLPLIYFVVTRKNPFSFFAGIFQAWITALGTASSAGTLPVTFRCLEENLGIDKRVTRFVLPVGATINMDGTALYEAVAAIFIAQMNGVVLDGGQIVTVSLTATLASVGAASIPSAGLVTMLLILTAVGLPTEDISLLVAVDWLLDRMRTSVNVVGDSFGAGIVYHLSKSELDTIDSQHRVHEDIEMTKTQSIYDDMKNHRESNSNQCVYAAHNSVIVDECKVTLAANGKSADCSVEEEPWKREK

SEQ ID NO: 68143 - protein, 366 aa, Homo sapiens [sequence omitted]

SEQ ID NO: 68144 - protein, 98 aa, Homo sapiens
MILSAAIFITLLGLLGYLHFVKIDQETLLIIDSLGIQMTSSYASGKESTTFIEMGKVKDIVINEAIYMSAKPRLDCLIEVYRSCQEILAHQKATSTSP

SEQ ID NO: 68145 - protein, 67 aa, Homo sapiens
MIQTLLIILFIIVPIFLLLDKDDSKAGMEEDHTYEGLDIDQTATYEDIVTLRTGEVKWSVGEHPGQE

SEQ ID NO: 68146 - protein, 332 aa, Homo sapiens
MAHFILFVFTVSTIFHVQQRLAKIQAMWELPVQIPVLASTSKALGPSQLRGMWTINAIGRLGNQMGEYATLYALAKMNGRPAFIPAQMHSTLAPIFRITLPVLHSATASRIPWQNYHLNDWMEEEYRHIPGEYVRFTGYPCSWTFYHHLRQEILQEFTLHDHVREEAQKFLRGLQVNGSRPGTFVGVHVRRGDYVHVMPKVWKGVVADRRYLQQALDWFRARYSSLIFVVTSNGMAWCRENIDTSHGDVVFAGDGIEGSPAKDFALLTQCNHTIMTIGTFGIWAAYLTGGDTIYLANYTLPDSPFLKIFKPEAAFLPEWTGIAADLSPLLKH

SEQ ID NO: 68147 - protein, 285 aa, Homo sapiens
MWVLCALITALLLGVTEHVLANNDVSCDHPSNTVPSGSNQDLGAGAGEDARSDDSSSRIINGSDCDMHTQPWQAALLLRPNQLYCGAVLVHPQWLLTAAHCRKKVFRVRLGHYSLSPVYESGQQMFQGVKSIPHPGYSHPGHSNDLMLIKLNRRIRPTKDVRPINVSSHCPSAGTKCLVSGWGTTKSPQVHFPKVLQCLNISVLSQKRCEDAYPRQIDDTMFCAGDKAGRDSCQGDSGGPVVCNGSLQGLVSWGDYPCARPNRPGVYTNLCKFTKWIQETIQANS

SEQ ID NO: 68148 - protein, 129 aa, Homo sapiens
MHFLFRFIVFFYLWGLFTAQRQKKEESTEEVKIEVLHRPENCSKTSKKGDLLNAHYDGYLAKDGSKFYCSRTQNEGHPKWFVLGVGQVIKGLDIAMTDMCPGEKRKVVIPPSFAYGKEGYDKPLLAKGI

SEQ ID NO: 68149 - protein, 462 aa, Homo sapiens [sequence omitted]

SEQ ID NO: 68150 - protein, 86 aa, Homo sapiens
MVIIIAIGAGIILGYSYKRGKDLKEQHDQKVCEREMQRITLPLSAFTNPTCEIVDEKTVVVHTSQTPVDPQEGTTPLMGQAGTPGA

SEQ ID NO: 68151 - protein, 384 aa, Homo sapiens
MGNADYVAAFLHLLLPLAFEFDPELVLVSAGFDSAIGDPEGQMQATPECFAHLTQLLQVLAGGRVCAVLEGGYHLESLAESVCMTVQTLLGDPAPPLSGPMAPCQSALESIQSARAAQAPHWKSLQQQDVTAVPMSPSSHSPEGRPPPLLPGGPVCKAAASAPSSLLDQPCLCPAPSVRTAVALTTPDITLVLPPDVIQQEASALREETEAWARPHESLAREEALTALGKLLYLLDGMLDGQVNSGIAATPASAAAATLDVAVRRGLSHGAQRLLCVALGQLDRPPDLAHDGRSLWLNIRGKEAAALSMFHVSTPLPVMTGGFLSCILGLVLPLAYGFQPDLVLVALGPGHGLQGPHAALLAAMLRGLAGGRVLALLEERTSRP

SEQ ID NO: 68152 - protein, 183 aa, Homo sapiens
MQTLWELMLLGEPLLVLAPSPDVSSEMVLALTSCLQPLRFCCDFRPYFTIHDSEFKEFTTRTQAPPNVVLGVTNPFFIKTLQHWPHILRVGEPKMSGDLPKQVKLKKPSRLKTLDTKPGLCSPRPGAPPPWRGLSCTWRVSRVGQPGPQTPDPLPGLSSRAQNPWGGVALFSSVGLGVWGVGG

SEQ ID NO: 68153 - protein, 48 aa, Homo sapiens
MVWINAFVMLTTQLLPSKYCDLLHKSAAHLGKWQKLEHGSYSNAPQHM

SEQ ID NO: 68154 - protein, 86 aa, Homo sapiens
MTVSLFLLLATSQSQDGCCDSGSCPNSRQQEGHGAAPASRCPCRPSLQAQEPKEESTQMWWLTPVIPPLWEAEARGSLEPRSWRPT

SEQ ID NO: 68155 - protein, 485 aa, Homo sapiens
MTVWILLLLSLYPGFTSQKSDDDYEDYASNKTWVLTPKVPEGDVTVILNNLLEGYDNKLRPDIGVKPTLIHTDMYVNSIGPVNAINMEYTIDIFFAQTWYDRRLKFNSTIKVLRLNSNMVGKIWIPDTFFRNSKKADAHWITTPNRMLRIWNDGRVLYTLRLTIDAECQLQLHNFPMDEHSCPLEFSSWSRSIAQAGMCSGVISAHYSLRFWGSTDPPTLASRVAGISDGYPREEIVYQWKRSSVEVGDTRSWRLYQFSFVGLRNTTEVVKTTSGDYVVMSVYFDLSRRMGYFTIQTYIPCTLIVVLSWVSFWINKDAVPARTSLGITTVLTMTTLSTIARKSLPKVSYVTAMDLFVSVCFIFVFSALVEYGTLHYFVSNRKPSKDKDKKKKNPAPTIDIRPRSATIQMNNATHLQERDEEYGYECLDGKDCASFFCCFEDCRTGAWRHGRIHIRIAKMDSYARIFFPTAFCLFNLVYWVSYLYL

SEQ ID NO: 68156 - protein, 280 aa, Homo sapiens
MAPRTLLLLLSGALALTQTWAGSHSMRYFFTSVSRPGRGEPRFIAVGYVDDTQFIMYGCDVGSDGRFLRGYRQDAYDGKDYIALNEDLRSWTAADMAAQITKRKWEAAHEAEQLRAYLDGTCVEWLRRYLENGKETLQRTDPPKTHMTHHPISDHEATLRCWALGFYPAEITLTWQRDGEDQTQDTELVETRPAGDGTFQKWAAVVVPSGEEQRYTCHVQHEGLPKPLTLRWELSSQPTIPIVGIIAGLVLLGAVITGAVVAAVMWRRKSSGGEGVKGGV

SEQ ID NO: 68157 - protein, 1111 aa, Homo sapiens
MVLFCLLFLYPGLADSAPSCPQNVNISGGTFTLSHGWAPGSLLTYSCPQGLYPSPASRLCKSSGQWQTPGATRSLSKAVCKPVRCPAPVSFENGIYTPRLGSYPVGGNVSFECEDGFILRGSPVRQCRPNGMWDGETAVCDNGDHENGTGTNTYAALNSVYLMMNNQMRLLGMETMAWQEIRHAIILLTDGKSNMGGSPKTAVDHIREILNINQKRNDYLDVSKLTDTICGVGNMSANASDQERTPWHVTIKPKSQETCRGALISDQWVLTAAHCFRDGNDHSLWRVNVGDPKSQWGKEFLIEKAVISPGFDVFAKKNQGILEFYGDDIALLKLAQKVKMSTHARPICLPCTMEANLALRRPQGSTCRDHENELLNKQSVPAHFVALNGSKLNINLKMGVEWTSCAEVVSQEKTMFPNLTDVREVVTDQFLCSGTQEDESPCKGGSAIHCPRPHDFENGEYWPRSPYYNVSDEISFHCYDGYTLRGSANRTCQVNGRWSGQTAICDNGAGYCSNPGIPIGTRKVGSQYRLEDSVTYHCSRGLTLRGSQRRTCQEGGSWSGTEPSCQDSFMYDTPQEVAEAFLSSLTETIEGVDAEDGHGPGEQQKRKIVLDPSGSMNIYLVLDGSDSIGASNFTGAKKCLVNLIEKVASYGVKPRYGLVTYATYPKIWVKVSEADSSNADWVTKQLNEINYEDHKLKSGTNTKKALQAVYSMMSWPDDVPPEGWNRTRHVIILMTDGLHNMGGDPITVIDEIRDLLYIGKDRKNPREDYLDVYVFGVGPLVNQVNINALASKKDNEQHVFKVKDMENLEDVFYQMIDESQSLSLCGMVWEHRKGTDYHKQPWQAKISVIRPSKGHESCMGAVVSEYFVLTAAHCFTVDDKEHSIKVSVGGEKRDLEIEVVLFHPNYNINGKKEAGIPEFYDYDVALIKLKNKLKYGQTIRPICLPCTEGTTRALRLPPTTTCQQQKEELLPAQDIKALFVSEEEKKLTRKEVYIKNGDKKGSCERDAQYAPGYDKVKDISEVVTPRFLCTGGVSPYADPNTCRGDSGGPLIVHKRSRFIQVGVISWGVVDVCKNQKRQKQVPAHARDFHINLFQVLPWLKEKLQDEDLGFL

SEQ ID NO: 68158 - protein, 83 aa, Homo sapiens [sequence omitted]

SEQ ID NO: 68159 - protein, 6 aa, Homo sapiens
MLLLLF

SEQ ID NO: 68160 - protein, 601 aa, Homo sapiens [sequence omitted]

SEQ ID NO: 68161 - protein, 115 aa, Homo sapiens
MLLAPLLPALLLVRPAGALVEGLYCGTRDCYEVLGVSRSAGKAEIARAYRQLARRYHPDRYRPQPGDEGPGRTPQSAEEAFLLVATAYETLKSSCICPRGLGVEWTPAEAPQLFL

SEQ ID NO: 68162 - protein, 32 aa, Homo sapiens
MSKSSYLILYAFLCSQVLQPWFQSGKHCRPGC

SEQ ID NO: 68163 - protein, 1161 aa, Homo sapiens
MWAMESGHLLWALLFMQSLWPQLTDGATRVYYLGIRDVQWNYAPKGRNVITNQPLDSDIVASSFLKSDKNRIGGTYKKTIYKEYKDDSYTDEVAQPAWLGFLGPVLQAEVGDVILIHLKNFATRPYTIHPHGVFYEKDSEGSLYPDGSSGPLKADDSVPPGGSHIYNWTIPEGHAPTDADPACLTWIYHSHVDAPRDIATGLIGPLITCKRGALDGNSPPQRQDVDHDFFLLFSVVDENLSWHLNENIATYCSDPASVDKEDETFQESNRMHAINGFVFGNLPELNMCAQKRVAWHLFGMGNEIDVHTAFFHGQMLTTRGHHTDVANIFPATFVTAEMVPWEPGTWLISCQVNSHFRDGMQALYKVKSCSMAPPVDLLTGKVRQYFIEAHEIQWDYGPMGHDGSTGKNLREPGSISDKFFQKSSSRIGGTYWKVRYEAFQDETFQEKMHLEEDRHLGILGPVIRAEVGDTIQVVFYNRASQPFSMQPHGVFYEKDYEGTVYNDGSSYPGLVAKPFEKVTYRWTVPPHAGPTAQDPACLTWMYFSAADPIRDTNSGLVGPLLVCRAGALGADGKQKGVDKEFFLLFTVLDENKSWYSNANQAAAMLDFRLLSEDIEGFQDSNRMHAINGFLFSNLPRLDMCKGDTVAWHLLGLGTETDVHGVMFQGNTVQLQGMRKGAAMLFPHTFVMAIMQPDNLGTFEIYCQAGSHREAGMRAIYNVSQCPGHQATPRQRYQAARIYYIMAEEVEWDYCPDRSWEREWHNQSEKDSYGYIFLSNKDGLLGSRYKKAVFREYTDGTFRIPRPRTGPEEHLGILGPLIKGEVGDILTVVFKNNASRPYSVHAHGVLESTTVWPLAAEPGEVVTYQWNIPERSGPGPNDSACVSWIYYSAVDPIKDMYSGLVGPLAICQKGILEPHGGRSDMDREFALLFLIFDENKSWYLEENVATHGSQDPGSINLQDETFLESNKMHAINGKLYANLRGLTMYQGERVAWYMLAMGQDVDLHTIHFHAESFLYRNGENYRADVVDLFPGTFEVVEMVASNPGTWLMHCHVTDHVHAGMETLFTVFSRTEHLSPLTVITKETEKAVPPRDIEEGNVKMLGMQIPIKNVEMLASVLVAISVTLLLVVLALGGVVWYQHRQRKLRRNRRSILDDSFKLLSFKQ

SEQ ID NO: 68164 - protein, 27 aa, Homo sapiens
IGHSAAPRLFPLAWTVLLLPLLLLQTP

SEQ ID NO: 68165 - protein, 246 aa, Homo sapiens
LAAALGLLTAGVSALEVYTPKEIFVANGTQGKLTCKFKSTSTTGGLTSVSWSFQPEGADTTVSFFHYSQGQVYLGNYPPFKDRISWAGDLDKKDASINIENMQFIHNGTYICDVKNPPDIVVQPGHIRLYVVEKENLPVFPVWVVVGIVTAVVLGLTLLISMILAVLYRRKNSKRDYTGCSTSESLSPVKQAPRKSPSDTEGLVKSLPSGSHQGPVIYAQLDHSGGHHSDKINKSESVVYADIRKN

SEQ ID NO: 68166 - protein, 42 aa, Homo sapiens
TCTFLILFMSDVQLLKIFLWLEDLIEKIYLDISMVKRQHRQV

SEQ ID NO: 68167 - protein, 37 aa, Homo sapiens
IYCSGCFLIPVLLGPGSFAPCPAPRRGGWCGNGWARW

SEQ ID NO: 68168 - protein, 15 aa, Homo sapiens
KEIRIAWLVLVSIFG

SEQ ID NO: 68169 - protein, 108 aa, Homo sapiens
TILSAVSLLLKFEMLYLIGLGLGDAKDITVKGLEVVRRCSRVYLEAYTSVLTVGKEALEEFYGRKLVVADREEVEQEADNILKDADISDVAFLVVGDPFGHLETRKLL

SEQ ID NO: 68170 - protein, 304 aa, Homo sapiens
TILSAGNWLLLVSLLLKFEMLYLIGLGLGDAKDITVKGLEVVRRCSRVYLEAYTSVLTVGKEALEEFYGRKLVVADREEVEQEADNILKDADISDVAFLVVGDPFGATTHSDLVLRATKLGIPYRVIHNASIMNAVGCCGLQLYKFGETVSIVFWTDTWRPESFFDKVKKNRQNGMHTLCLLDIKVKEQSLENLIKGRKIYEPPRYMSVNQAAQQLLEIVQNQRIRGEEPAVTEETLCVGLARVGADDQKIAAGTLRQMCTVDLGEPLHSLIITGGSIHPMEMEMLSLFSIPENSSESQSINGL

SEQ ID NO: 68171 - protein, 297 aa, Homo sapiens
LLASLGVGLVTLLGLAVGSYLVRRSRRPQVTLLDPNEKYLLRLLDKTTVSHNTKRFRFALPTAHHTLGLPVGKHIYLSTRIDGSLVIRPYTPVTSDEDQGYVDLVIKVYLKGVHPKFPEGGKMSQYLDSLKVGDVVEFRGPSGLLTYTGKGHFNIQPNKKSPPEPRVAKKLGMIAGGTGITPMLQLIRAILKVPEDPTQCFLLFANQTEKDIILREDLEELQARYPNRFKLWFTLDHPPKDWAYSKGFVTADMIREHLPAPGDDVLVLLCGPPPMVQLACHPNLDKLGYSQKMRFTY

SEQ ID NO: 68172 - protein, 17 aa, Homo sapiens
MLFTLSVMFLLMGDCMN

SEQ ID NO: 68173 - protein, 25 aa, Homo sapiens
IVIVILMEFLTLNLMISIQKLLKSC

SEQ ID NO: 68174 - protein, 19 aa, Homo sapiens
TAMKLVFLGGDFSIVLSMC

SEQ ID NO: 68175 - protein, 48 aa, Homo sapiens
LILIIVIYILKYQEIVSVLLPLQWRVLLFFGLEEEHPMVCQKAKCVLR

SEQ ID NO: 68176 - protein, 42 aa, Homo sapiens
IYILKYQEIVSVLLPLQWRVLLFFGLEEEHPMVCQKAKCVLR

SEQ ID NO: 68177 - protein, 494 aa, Homo sapiens
LLGLWLLLCSCGCPEGAELRAPPDKIAIIGAGIGGTSAAYYLRQKFGKDVKIDLFEREEVGGRLATMMVQGQEYEAGGSVIHPLNLHMKRFVKDLGLSAVQASGGLLGIYNGETLVFEESNWFIINVIKLVWRYGFQSLRMHMWVEDVLDKFMRIYRYQSHDYAFSSVEKLLHALGGDDFLGMLNRTLLETLQKAGFSEKFLNEMIAPVMRVNYGQSTDINAFVGAVSLSCSDSGLWAVEGGNKLVCSGLLQASKSNLISGSVMYIEEKTKTKYTGNPTKMYEVVYQIGTETRSDFYDIVLVATPLNRKMSNITFLNFDPPIEEFHQYYQHIVTTLVKGELNTSIFSSRPIDKFGLNTVLTTDNSDLFINSIGIVPSVREKEDPEPSTDGTYVWKIFSQETLTKAQILKLFLSYDYAVKKPWLAYPHYKPPEKCPSIILHDRLYYLNGIECAASAMEMSAIAAHNAALLAYHRWNGHTDMIDQDGLYEKLKTEL

SEQ ID NO: 68178 - protein, 19 aa, Homo sapiens
MREGSAMLFLQTRMLMAFM

SEQ ID NO: 68179 - protein, 18 aa, Homo sapiens
IVSFLVIVVTSVVRGRGQ

SEQ ID NO: 68180 - protein, 19 aa, Homo sapiens
ITIMAVFLCLKTVKQERII

SEQ ID NO: 68181 - protein, 62 aa, Homo sapiens
LDILKDNWSPALTISKVLLSICSLLTDCNPADPLVGSIATQYLTNRAEHDRIARQWTKRYAT

SEQ ID NO: 68182 - protein, 1077 aa, Homo sapiens
VRPPMAAAGQLCLLYLSAGLLSRLGAAFNLDTREDNVIRKYGDPGSLFGFSLAMHWQLQPEDKRLLLVGAPRAEALPLQRANRTGGLYSCDITARGPCTRIEFDNDADPTSESKEDQWMGVTVQSQGPGGKVVTCAHRYEKRQHVNTKQESRDIFGRCYVLSQNLRIEDDMDGGDWSFCDGRLRGHEKFGSCQQGVAATFTKDFHYIVFGAPGTYNWKGIVRVEQKNNTFFDMNIFEDGPYEVGGETEHDESLVPVPANSYLGFSLDSGKGIVSKDEITFVSGAPRANHSGAVVLLKRDMKSAHLLPEHIFDGEGLASSFGYDVAVVDLNKDGWQDIVIGAPQYFDRDGEVGGAVYVYMNQQGRWNNVKPIRLNGTKDSMFGIAVKNIGDINQDGYPDIAVGAPYDDLGKVFIYHGSANGINTKPTQVLKGISPYFGYSIAGNMDLDRNSYPDVAVGSLSDSVTIFRSRPVINIQKTITVTPNRIDLRQKTACGAPSGICLQVKSCFEYTANPAGYNPSISIVGTLEAEKERRKSGLSSRVQFRNQGSEPKYTQELTLKRQKQKVCMEETLWLQDNIRDKLRPIPITASVEIQEPSSRRRVNSLPEVLPILNSDEPKTAHIDVHFLKEGCGDDNVCNSNLKLEYKFCTREGNQDKFSYLPIQKGVPELVLKDQKDIALEITVTNSPSNPRNPTKDGDDAHEAKLIATFPDTLTYSAYRELRAFPEKQLSCVANQNGSQADCELGNPFKRNSNVTFYLVLSTTEVTFDTPDLDINLKLETTSNQDNLAPITAKAKVVIELLLSVSGVAKPSQVYFGGTVVGEQAMKSEDEVGSLIEYEFRVINLGKPLTNLGTATLNIQWPKEISNGKWLLYLVKVESKGLEKVTCEPQKEINSLNLTESHNSRKKREITEKQIDDNRKFSLFAERKYQTLNCSVNVNCVNIRCPLRGLDSKASLILRSRLWNSTFLEEYSKLNYLDILMRAFIDVTAAAENIRLPNAGTQVRVTVFPSKTVAQYSGVPWWIILVAILAGILMLALLVFILWKCGFFKRNKKDHYDATYHKAEIHAQPSDKERLTSDA

SEQ ID NO: 68183 - protein, 151 aa, Homo sapiens
LFALGIVLAACQALENSTSPLSADPPVAAAVVSHFNDCPDSHTQFCFHGTCRFLVQEDKPACVCHSGYVGARCEHADLLAVVAASQKKQAITALVVVSIVALAVLIITCVLIHCCQVRKHCEWCRALICRHEKPSALLKGRTACCHSETVV

SEQ ID NO: 68184 - protein, 489 aa, Homo sapiens
IRGRKRYPSRMRFVVALVLLNVAAAGAVPLLATESVKQEEAGVRPSAGNVSTHPSLSQRPGGSTKSHPEPQTPKDSPSKSSAEAQTPEDTPNKSGAEAKTQKDSSNKSGAEAKTQKGSTSKSGSEAQTTKDSTSKSHPELQTPKDSTGKSGAEAQTPEDSPNRSGAEAKTQKDSPSKSGSEAQTTKDVPNKSGADGQTPKDGSSKSGAEDQTPKDVPNKSGAEKQTPKDGSNKSGAEEQGPIDGPSKSGAEEQTSKDSPNKVVPEQPSRKDHSKPISNPSDNKELPKADTNQLADKGKLSPHAFKTESGEETDLISPPQEEVKSSEPTEDVEPKEAEDDDTGPEEGSPPKEEKEKMSGSASSENREGTLSDSTGSEKDDLYPNGSGNGSAESSHFFAYLVTAAILVAVLYIAHHNKRKIIAFVLEGKRSKVTRRPKASDYQRLDQKYVLILNVFPAPPKRSFFPVLTEWYIPLEKDERHQWIVLLSFQL

SEQ ID NO: 68185 - protein, 45 aa, Homo sapiens
LQDHQVRMSLMWLLHLQIYALEQCGLMKLWDPLDLKIRGSSFLGT

SEQ ID NO: 68186 - protein, 758 aa, Homo sapiens
VGISLGFTLSLLSVTWVEEPCGPGPPQPGDSELPPRGNTNAARRPNSVQPGAEREKPGAGEGAGENWEPRVLPYHPAQPGQAAKKAVRTRYISTELGIRQRLLVAVLTSQTTLPTLGVAVNRTLGHRLERVVFLTGARGRRAPPGMAVVTLGEERPIGHLHLALRHLLEQHGDDFDWFFLVPDTTYTEAHGLARLTGHLSLASAAHLYLGRPQDFIGGEPTPGRYCHGGFGVLLSRMLLQQLRPHLEGCRNDIVSARPDEWLGRCILDATGVGCTGDHEGVHYSHLELSPGEPVQEGDPHFRSALTAHPVRDPVHMYQLHKAFARAELERTYQEIQELQWEIQNTSHLAVDGDQAAAWPVGIPAPSRPASRFEVLRWDYFTEQHAFSCADGSPRCPLRGADRADVADVLGTALEELNRRYHPALRLQKQQLVNGYRRFDPARGMEYTLDLQLEALTPQGGRRPLTRRVQLLRPLSRVEILPVPYVTEASRLTVLLPLAAAERDLAPGFLEAFATAALEPGDAAAALTLLLLYEPRQAQRVAHADVFAPVKAHVAELERRFPGARVPWLSVQTAAPSPLRLMDLLSKKHPLDTLFLLAGPDTVLTPDFLNRCRMHAISGWQAFFPMHFQAFHPAVAPPQGPGPPELGRDTGRFDRQAASEACFYNSDYVAARGRLAAASEQEEELLESLDVYELFLHFSSLHVLRAVEPALLQRYRAQTCSARLSEDLYHRCLQSVLEGLGSRTQLAMLLFEQEQGNST

SEQ ID NO: 68187 - protein, 297 aa, Homo sapiens
LLLTLLAFAGYSGLLAGVEVSAGSPPIRNVTVAYKFHMGLYGETGRLFTESCSISPKLRSIAVYYDNPHMVPPDKCRCAVGSILSEGEESPSPELIDLYQKFGFKVFSFPAPSHVVTATFPYTTILSIWLATRRVHPALDTYIKERKLCAYPRLEIYQEDQIHFMCPLARQGDFYVPEMKETEWKWRGLVEAIDTQVDGTGADTMSDTSSVSLEVSPGSRETSAATLSPGASSRGWDDGDTRSEHSYSESGASGSSFEELDLEGEGPLGESRLDPGTEPLGTTKWLWEPTAPEKGKE

SEQ ID NO: 68188 - protein, 43 aa, Homo sapiens
IVIVGMNYAFITWLVKSRLKRLCSSEVGLLKNAEREQESEEEM

SEQ ID NO: 68189 - protein, 62 aa, Homo sapiens
LLLWLVLSLLGIQLAWGFYGNTVTGLYHRPGLGGQNGSTPDGSTHFPSWEMAANEPLKTHRE

SEQ ID NO: 68190 - protein, 433 aa, Homo sapiens
LYLGNVLALLLFVHYSNGDESSDPGPQHRAQGPGPEPTLGPLTRLEGIKVGHERKVQLVTDRDHFIRTLSLKPLLFEIPGFLTDEECRLIIHLAQMKGLQRSQILPTEEYEEAMSTMQVSQLDLFRLLDQNRDGHLQLREVLAQTRLGNGWWMTPESIQEMYAAIKADPDGDGVLSLQEFSNMDLRDFHKYMRSHKAESSELVRNSHHTWLYQGEGAHHIMRAIRQRVLRLTRLSPEIVELSEPLQVVRYGEGGHYHAHVDSGPVYPETICSHTKLVANESVPFETSCRYMTVLFYLNNVTGGGETVFPVADNRTYDEMSLIQDDVDLRDTRRHCDKGNLRVKPQQGTAVFWYNYLPDGQGWVGDVDDYSLHGGCLVTRGTKWIANNWINVDPSRARQALFQQEMARLAREGGTDSQPEWALDRAYRDARVEL

SEQ ID NO: 68191 - protein, 317 aa, Homo sapiens
LNAIHLAMMSNSLPCLLLLVAAGADVNAQEQKSGRTALHLAVEHDNISLAGCLLLEGDAHVDSTTYDGTTPLHIAAGRGSTRLAALLKAAGADPLVENFEPLYDLDDSWENAGEDEGVVPGTTPLDMATSWQVFDILNGKPYEPEFTSDDLLAQGDMKQLAEDVKLQLYKLLEIPDPDKNWATLAQKLGLGILNNAFRLSPAPSKTLMDNYEVSGGTVRELVEALRQMGYTEAIEVIQAASSPVKTTSQAHSLPLSPASTRQQIDELRDSDSVCDSGVETSFRKLSFTESLTSGASLLTLNKMPHDYGQEGPLEGKI

SEQ ID NO: 68192 - protein, 69 aa, Homo sapiens
VKQTHRILVIISGSLHFICLMEILSDIQQPCKWSGLCQTATNSCRTISEAAYPRSLMWKDMAVTAWGSK

SEQ ID NO: 68193 - protein, 261 aa, Homo sapiens
VHAATGLPWWGSILLSTVALRGAVTLPLAAYQHYILAKVENLQPEIKTIARHLNQEVAVRANQLGWSKRDARLTYLKNMRRLISELYVRDNCHPFKATVLVWIQLPMWIFMSFALRNLSTGAAHSEAGFSVQEQLATGGILWFPDLTAPDSTWILPISVGVINLLIVEICALQKIGMSRFQTYITYFVRAMSVLMIPIAATVPSSIVLYWLCSSFVGLSQNLLLRSPGFRQLCRIPSTKSDSETPYKDIFAAFNTKFISRK

SEQ ID NO: 68194 - protein, 35 aa, Homo sapiens
MMAVGISLFIVAWVHLTASVTRMGKEWNDILERCL

SEQ ID NO: 68195 - protein, 1057 aa, Homo sapiens
LPLLSVLLLPLLGGTQTAIVFIKQPSSQDALQGRRALLRCEVEAPGPVHVYWLLDGAPVQDTERRFAQGSSLSFAAVDRLQDSGTFQCVARDDVTGEEARSANASFNIKWIEAGPVVLKHPASEAEIQPQTQVTLRCHIDGHPRPTYQWFRDGTPLSDGQSNHTVSSKERNLTLRPAGPEHSGLYSCCAHSAFGQACSSQNFTLSIADESFARVVLAPQDVVVARYEEAMFHCQFSAQPPPSLQWLFEDETPITNRSRPPHLRRATVFANGSLLLTQVRPRNAGIYRCIGQGQRGPPIILEATLHLAEIEDMPLFEPRVFTAGSEERVTCLPPKGLPEPSVWWEHAGVRLPTHGRVYQKGHELVLANIAESDAGVYTCHAANLAGQRRQDVNITVATVPSWLKKPQDSQLEEGKPGYLDCLTQATPKPTVVWYRNQMLISEDSRFEVFKNGTLRINSVEVYDGTWYRCMSSTPAGSIEAQARVQVLEKLKFTPPPQPQQCMEFDKEATVPCSATGREKPTIKWERADGSSLPEWVTDNAGTLHFARVTRDDAGNYTCIASNGPQGQIRAHVQLTVAVFITFKVEPERTTVYQGHTALLQCEAQGDPKPLIQWKGKDRILDPTKLGPRMHIFQNGSLVIHDVAPEDSGRYTCIAGNSCNIKHTEAPLYVVDKPVPEESEGPGSPPPYKMIQTIGLSVGAAVAYIIAVLGLMFYCKKRCKAKRLQKQPEGEEPEMECLNGGPLQNGQPSAEIQEEVALTSLGSGPAATNKRHSTSDKMHFPRSSLQPITTLGKSEFGEVFLAKAQGLEEGVAETLVLVKSLQSKDEQQQLDFRRELEMFGKLNHANVVRLLGLCREAEPHYMVLEYVDLGDLKQFLRISKSKDEKLKSQPLSTKQKVALCTQVALGMEHLSNNRFVHKDLAARNCLVSAQRQVKVSALGLSKDVYNSEYYHFRQAWVPLRWMSPEAILEGDFSTKSDVWAFGVLMWEVFTHGEMPHGGQADDEVLADLQAGKARLPQPEGCPSKLYRLMQRCWALSPKDRPSFSEIASALGDSTVDSKP

SEQ ID NO: 68196 - protein, 239 aa, Homo sapiens
KILLCLPLLLLLSGWSRAGRADPHSLCYDITVIPKFRPGPRWCAVQGQVDEKTFLHYDCGNKTVTPVSPLGKKLNVTTAWKAQNPVLREVVDILTEQLRDIQLENYTPKEPLTLQARMSCEQKAEGHSSGSWQFSFDGQIFLLFDSEKRMWTTVHPGARKMKEKWENDKVVAMSFHYFSMGDCIGWLEDFLMGMDSTLEPSAGAPLAMSSGTTQLRATATTLILCCLLIILPCFILPGI

SEQ ID NO: 68197 - protein, 16 aa, Homo sapiens
KVVFPGRGLSIALWMC

SEQ ID NO: 68198 - protein, 26 aa, Homo sapiens
LLLTLSLFKLSLQLDARITFGAESPG

SEQ ID NO: 68199 - protein, 564 aa, Homo sapiens
RPPPPPLLLLLLWVTGQAAPVAGLGSDAELQIERRFVPDECPRTVRSGDFVRYHYVGTFPDGQKFDSSYDRDSTFNVFVGKGQLITGMDQALVGMCVNERRFVKIPPKLAYGNEGVSGVIPPNSVLHFDVLLMDIWNSEDQVQIHTYFKPPSCPRTIQVSDFVRYHYNGTFLDGTLFDSSHNRMKTYDTYVGIGWLIPGMDKGLLGMCVGEKRIITIPPFLAYGEDGDGKDIPGQASLVFDVALLDLHNPKDSISIENKVVPENCERISQSGDFLRYHYNGTLLDGTLFDSSYSRNRTFDTYIGQGYVIPGMDEGLLGVCIGEKRRIVVPPHLGYGEEGRGNIPGSAVLVFDIHVIDFHNPSDSISITSHYKPPDCSVLSKKGDYLKYHYNASLLDGTLLDSTWNLGKTYNIVLGSGQVVLGMDMGLREMCVGEKRTVIIPPHLGYGEAGVDGEVPGSAVLVFDIELLELVAGLPEGYMFIWNGEVSPNLFEEIDKDGNGEVLLEEFSEYIHAQVASGKGKLAPGFDAELIVKNMFTNQDRNGDGKVTAEEFKLKDQEAKHDEL

SEQ ID NO: 68200 - protein, 16 aa, Homo sapiens
TPQAQIPALLLASCLG

SEQ ID NO: 68201 - protein, 350 aa, Homo sapiens
VAVGLLGIALALLGERLLALRNRLKASREVESVDLPHCHLIKGIEAGSEDIDILPNGLAFFSVGLKFPGLHSFAPDKPGGILMMDLKEEKPRARELRISRGFDLASFNPHGISTFIDNDDTVYLFVVNHPEFKNTVEIFKFEEAENSLLHLKTVKHELLPSVNDITAVGPAHFYATNDHYFSDPFLKYLETYLNLHWANVVYYSPNEVKVVAEGFDSANGINISPDDKYIYVADILAHEIHVLEKHTNMNLTQLKVLELDTLVDNLSIDPSSGDIWVGCHPNGQKLFVYDPNNPPSSEVLRIQNILSEKPTVTTVYANNGSVLQGSSVASVYDGKLLIGTLYHRALYCEL

SEQ ID NO: 68202 - protein, 348 aa, Homo sapiens
KFVVFIVAVLLPVRVDSATIPRQDEVPQQTVAPQQQRRSLKEEECPAGSHRSEYTGACNPCTEGVDYTIASNNLPSCLLCTVCKSGQTNKSSCTTTRDTVCQCEKGSFQDKNSPEMCRTCRTGCPRGMVKVSNCTPRSDIKCKNESAASSTGKTPAAEETVTTILGMLASPYHYLIIIVVLVIILAVVVVGFSCRKKFISYLKGICSGGGGGPERVHRVLFRRRSCPSRVPGAEDNARNETLSNRYLQPTQVSEQEIQGQELAELTGVTVELPEEPQRLLEQAEAEGCQRRRLLVPVNDADSADISTLLDASATLEEGHAKETIQDQLVGSEKLFYEEDEAGSATSCL

SEQ ID NO: 68203 - protein, 326 aa, Homo sapiens
LLLGLHLFLLTAGPALGWNDPDRMLLRDVKALTLHYDRYTTSRRLDPIPQLKCVGGTAGCDSYTPKVIQCQNKGWDGYDVQWECKTDLDIAYKFGKTVVSCEGYESSEDQYVLRGSCGLEYNLDYTELGLQKLKESGKQHGFASFSDYYYKWSSADSCNMSGLITIVVLLGIAFVVYKLFLSDGQYSPPPYSEYPPFSHRYQRFTNSAGPPPPGFKSEFTGPQNTGHGATSGFGSAFTGQQGYENSGPGFWTGLGTGGILGYLFGSNRAATPFSDSWYYPSYPPSYPGTWNRAYSPLHGGSGSYSVCSNSDTKTRTASGYGGTRRR

SEQ ID NO: 68204 - protein, 12 aa, Homo sapiens
LASFLTYVAVAF

SEQ ID NO: 68205 - protein, 55 aa, Homo sapiens
LLDLLLIQIWTIFVSCFEVQVILANQVPKDHPTIPRAISRECLSTNPSSVWSLVD

SEQ ID NO: 68206 - protein, 16 aa, Homo sapiens
LGLTLWRNTFCILCLI

SEQ ID NO: 68207 - protein, 22 aa, Homo sapiens
LAGVQWLLTGMIIAYCSLELLD

SEQ ID NO: 68208 - protein, 28 aa, Homo sapiens
IFIPLVLFFILLGLRQKKPTISVKEVCK

SEQ ID NO: 68209 - protein, 13 aa, Homo sapiens
VIWCTLIPVTFGL

SEQ ID NO: 68210 - protein, 439 aa, Homo sapiens
LKLSLRGDTAAAAALLPLLCLPMDMHCKADPFSAMHPGHGGVNQLGGVFVNGRPLPDVVRQRIVELAHQGVRPCDISRQLRVSHGCVSKILGRYYETGSIKPGVIGGSKPKVATPKVVDKIAEYKRQNPTMFAWEIRDRLLAEGICDNDTVPSVSSINRIIRTKVQQPFHPTPDGAGTGVTAPGHTIVPSTASPPVSSASNDPVGSYSINGILGIPRSNGEKRKRDEVEVYTDPAHIRGGGGLHLVWTLRDVSEGSVPNGDSQSGVDSLRKHLRADTFTQQQLEALDRVFERPSYPDVFQASEHIKSEQGNEYSLPALTPGLDEVKSSLSASTNPELGSNVSGTQTYPVVTGRDMASTTLPGYPPHVPPTGQGSYPTSTLAGMVPGSEFSGNPYSHPQYTAYNEAWRFSNPALLSSPYYYSAAPRGSAPAAAAAAYDRH

SEQ ID NO: 68211 - protein, 40 aa, Homo sapiens
IFAILEYTVVLTNMAFHMTAWWDFGNKELLITSQPEEKRF

SEQ ID NO: 68212 - protein, 21 aa, Homo sapiens
ILLFLKALCIVECSWMFISSV

SEQ ID NO: 68213 - protein, 49 aa, Homo sapiens
IFSPSFEDLPPSMSCILICLTVHVFHLQPFACVQPTVCLQFLNCTSCVS

SEQ ID NO: 68214 - protein, 736 aa, Homo sapiens
LLLLLVGLTAPALALAGYIEALAANAGTGFAVAEPQIAMFCGKLNMHVNIQTGKWEPDPTGTKSCFETKEEVLQYCQEMYPELQITNVMEANQRVSIDNWCRRDKKQCKSRFVTPFKCLVGEFVSDVLLVPEKCQFFHKERMEVCENHQHWHTVVKEACLTQGMTLYSYGMLLPCGVDQFHGTEYVCCPQTKIIGSVSKEEEEEDEEEEEEEDEEEDYDVYKSEFPTEADLEDFTEAAVDEDDEDEEEGEEVVEDRDYYYDTFKGDDYNEENPTEPGSDGTMSDKEITHDVKAVCSQEAMTGPCRAVMPRWYFDLSKGKCVRFIYGGCGGNRNNFESEDYCMAVCKAMIPPTPLPTNDVDVYFETSADDNEHARFQKAKEQLEIRHRNRMDRVKKEWEEAELQAKNLPKAERQTLIQHFQAMVKALEKEAASEKQQLVETHLARVEAMLNDRRRMALENYLAALQSDPPRPHRILQALRRYVRAENKDRLHTIRHYQHVLAVDPEKAAQMKSQVMTHLHVIEERRNQSLSLLYKVPYVAQEIQEEIDELLQEQRADMDQFTASISETPVDVRVSSEESEEIPPFHPFHPFPALPENEGSGVGEQDGGLIGAEEKVINSKNKVDENMVIDETLDVKEMIFNAERVGGLEEERESVGPLREDFSLSSSALIGLLVIAVAIATVIVISLVMLRKRQYGTISHGIVEVDPMLTPEERHLNKMQNHGYENPTYKYLEQMQI

SEQ ID NO: 68215 - protein, 19 aa, Homo sapiens
LALGLSCGASLSFLFKALL

SEQ ID NO: 68216 - protein, 134 aa, Homo sapiens
LLAALLLLLSGDGAVRCDTPANCTYLDLLGTWVFQVGSSGSQRDVNCSVMGPQEKKVVVYLQKLDTAYDDLGNSGHFTIIYNQGFEIVLNDYKWFAFFKDVTDFISHLFMQLGTVGIYDLPHLRNKLAMNRRWG

SEQ ID NO: 68217 - protein, 509 aa, Homo sapiens
LLLSFLAPWATIALRPALRALGSLHLPTNPTSLPAVAKNYSVLYFQQKALAAGQLHICIIQLNHYKTPLVDHFGFNTVKTFNQRYLVADKYWKKNGGSILFYTGNEGDIIWFCNNTGFMWDVAEELKAMLVFAEHRYYGESLPFGDNSFKDSRHLNFLTSEQALADFAELIKHLKRTIPGAENQPVIAIGGSYGGMLAAWFRMKYPHMVVGALAASAPIWQFEDLVPCGVFMKIVTTDFRKSGPHCSESIHRSWDAINRLSNTGSGLQWLTGALHLCSPLTSQDIQHLKDWISETWVNLAMVDYPYASNFLQPLPAWPIKVVCQYLKNPNVSDSLLLQNIFQALNVYYNYSGQVKCLNISETATSSLGTLGWSYQACTEVVMPFCTNGVDDMFEPHSWNLKELSDDCFQQWGVRPRPSWITTMYGGKNISSHTNIVFSNGELDPWSGGGVTKDITDTLVAVTISEGAHHLDLRTKNALDPMSVLLARSLEVRHMKNWIRDFYDSAGKQH

SEQ ID NO: 68218 - protein, 245 aa, Homo sapiens
ILFLTMVISYFGCMKAAPMKEANIRGQGGLAYPGVRTHGTLESVNGPKAGSRGLTSLADTFEHVIEELLDEDQKVRPNEENNKDADLYTSRVMLSSQVPLEPPLLFLLEEYKNYLDAANMSMRVRRHSDPARRGELSVCDSISEWVTAADKKTAVDMSGGTVTVLEKVPVSKGQLKQYFYETKCNPMGYTKEGCRGIDKRHWNSQCRTTQSYVRALTMDSKKRIGWRFIRIDTSCVCTLTIKRGR

SEQ ID NO: 68219 - protein, 11 aa, Homo sapiens
ILGIILATTLS

SEQ ID NO: 68220 - protein, 36 aa, Homo sapiens
LMFVASNVLWSFLLQSDLGLESLIFATDVCSFQCTC

SEQ ID NO: 68221 - protein, 81 aa, Homo sapiens
VCLVIVLWGIRLLLQRKKKLVSTSKNGKNQMVIAFFHPYCNAGGGGERVLWCALRALQKKSCGVYGSWHNYPCTQFGGPKA

SEQ ID NO: 68222 - protein, 533 aa, Homo sapiens
ISSFGPLFYAIMYVIESARQRPPKRKYLSSGRKSVFQKLYDLYIEECEKEPEVKKLRRNVNLLEKLVMQETLSCLVVNLYPGNEGYSLMLRGKNGSDSETIRLPYEEGELLEYLDAEELPPILVDLLEKSQVNIFHCGCVIAEIRDYRQSSNMKSPGYQSRHILLRPTMQTLICDVHSITSDNHKWTQEDKLLLESQLILATAEPLCLDPSIAVTCTANRLLYNKQKMNTRPMKRCFKRYSRSSLNRQQDLSHCPPPPQLRLLDFLQKRKERKAGQHYDLKISKAGNCVDMWKRSPCNLAIPSEVDVEKYAKVEKSIKSDDSQPTVWPAHDVKDDYVFECEAGTQYQKTKLTILQSLGDPLYYGKIQPCKADEESDSQMSPSHSSTDDHSNWFIIGSKTDAERVVNQYQELVQNEAKCPVKMSHSSSGSASLSQVSPGKETDQTETVSVQSSVLGKGVKHRPPPIKLPSSSGNSSSGNYFTPQQTSSFLKSPTPPPSSKPSSIPRKSSVDLNQVSMLSPAALSPASSSQRHES

SEQ ID NO: 68223 - protein, 26 aa, Homo sapiens
MKKMERPLFTLWLSICSLLCLYGPIG

SEQ ID NO: 68224 - protein, 50 aa, Homo sapiens
IRLHYFALTAILMVTAWPGGNLIGQIQPKPGGREWAFRRGRGGRETKEEE

SEQ ID NO: 68225 - protein, 120 aa, Homo sapiens
IFITLLGLLGYLHFVKIDQETLLIIDSLGIQMTSSYASGKESTTFIEMGKVKDIVINEAIYMQKVIYYLCILLKDPVEPHGISQVVPVFQSAKPRLDCLIEVYRSCQEILAHQKATSTSP

SEQ ID NO: 68226 - protein, 126 aa, Homo sapiens
IRAEMSRSVALAVLALLSLSGLEAIQRTPKIQVYSRHPAENGKSNFLNCYVSGFHPSDIEVDLLKNGERIEKVEHSDLSFSKDWSFYLLYYTEFTPTEKDEYACRVNHVTLSQPKIVKWGKSYILL

SEQ ID NO: 68227 - protein, 184 aa, Homo sapiens
LALSLLLVSGSLLPGPGAAQNAAPDITGHKRSENKNEGQDATMYCKSVGYPHPDWIWRKKENGMPMDIVNTSGRFFIINKENYTELNIVNLQITEDPGEYECNATNAIGSASVVTVLRVRSHLAPLWPFLGILAEIIILVVIIVVYEKRKRPDEVPDDDEPAGPMKTNSTNNHKDKNLRQRNTN

SEQ ID NO: 68228 - protein, 76 aa, Homo sapiens
IDAYVRQGLLSAVSSVLLSLPAARLLEDLMDELLEARSWLADVAEKDPDEDCRTLALRALLLLQRLKNRLLPPASP

SEQ ID NO: 68229 - protein, 20 aa, Homo sapiens
KDMAGDWHWALRVSLVLAWG

SEQ ID NO: 68230 - protein, 166 aa, Homo sapiens
LVSASAAVLLTLQATVDSSQAPGSVQPAPITPTGEDVKPIDLTVQVEFAAAEGAAAAAAASELQAATAGLEAAECPMGPQLVVVGEEGFPDTGSDHSYSLSSGTTEEELLRKLNEQRDILALMEVKMKEMKGSIRHLRLTEAKLREELREKDRLLAMAVIRKKHGM

SEQ ID NO: 68231 - protein, 337 aa, Homo sapiens
LGPGQLGAVAILLYLGLLRSGTGAEGAEAPCGVAPQARITGGSSAVAGQWPWQVSITYEGVHVCGGSLVSEQWVLSAAHCFPSEHHKEAYEVKLGAHQLDSYSEDAKVSTLKDIIPHPSYLQEGSQGDIALLQLSRPITFSRYIRPICLPAANASFPNGLHCTVTGWGHVAPSVSLLTPKPLQQLEVPLISRETCNCLYNIDAKPEEPHFVQEDMVCAGYVEGGKDACQGDSGGPLSCPVEGLWYLTGIVSWGDACGARNRPGVYTLASSYASWIQSKVTELQPRVVPQTQESQPDSNLCGSHLAFSSAPAQGLLRPILFLPLGLALGLLSPWLSEH

SEQ ID NO: 68232 - protein, 347 aa, Homo sapiens
TSPTTNVLLSPLSVATALSALSLGAEQRTESIIHRALYYDLISSPDIHGTYKELLDTVTAPQKNLKSASRIVFEKKLRIKSSFVAPLEKSYGTRPRVLTGNPRLDLQEINNWVQAQMKGKLARSTKEIPDEISILLLGVAHFKGQWVTKFDSRKTSLEDFYLDEERTVRVPMMSDPKAVLRYGLDSDLSCKIAQLPLTGSMSIIFFLPLKVTQNLTLIEESLTSEFIHDIDRELKTVQAVLTVPKLKLSYEGEVTKSLQEMKLQSLFDSPDFSKITGKPIKLTQVEHRAGFEWNEDGAGTTPSPGLQPAHLTFPLDYHLNQPFIFVLRDTDTGALLFIGKILDPRGP

SEQ ID NO: 68233 - protein, 17 aa, Homo sapiens
IAISRYVTLFSRISLIL

SEQ ID NO: 68234 - protein, 831 aa, Homo sapiens
LLLLTLAILIFASDACKNVTLHVPSKLDAEKLVGRVNLKECFTAANLIHSSDPDFQILEDGSVYTTNTILLSSEKRSFTILLSNTENQEKKKIFVFLEHQTKVLKKRHTKEKVLRRAKRRWAPIPCSMLENSLGPFPLFLQQVQSDTAQNYTIYYSIRGPGVDQEPRNLFYVERDTGNLYCTRPVDREQYESFEIIAFATTPDGYTPELPLPLIIKIEDENDNYPIFTEETYTFTIFENCRVGTTVGQVCATDKDEPDTMHTRLKYSIIGQVPPSPTLFSMHPTTGVITTTSSQLDRELIDKYQLKIKVQDMDGQYFGLQTTSTCIINIDDVNDHLPTFTRTSYVTSVEENTVDVEILRVTVEDKDLVNTANWRANYTILKGNENGNFKIVTDAKTNEGVLCVVKPLNYEEKQQMILQIGVVNEAPFSREASPRSAMSTATVTVNVEDQDEGPECNPPIQTVRMKENAEVGTTSNGYKAYDPETRSSSGIRYKKLTDPTGWVTIDENTGSIKVFRSLDREAETIKNGIYNITVLASDQGGRTCTGTLGIILQDVNDNSPFIPKKTVIICKPTMSSAEIVAVDPDEPIHGPPFDFSLESSTSEVQRMWRLKAINDTAARLSYQNDPPFGSYVVPITVRDRLGMSSVTSLDVTLCDCITENDCTHRVDPRIGGGGVQLGKWAILAILLGIALLFCILFTLVCGASGTSKQPKVIPDDLAQQNLIVSNTEAPGDDKVYSANGFTTQTVGASAQGVCGTVGSGIKNGGQETIEMVKGGHQTSESCRGAGHHHTLDSCRGGHTEVDNCRYTYSEWHSFTQPRLGEESIRGHTLIKN

SEQ ID NO: 68235 - protein, 55 aa, Homo sapiens
LGFCGLTALYFLIRAFRLKKPQRRRYGLLANTEDPTEMASLDSDEETVFESRNLR

SEQ ID NO: 68236 - protein, 244 aa, Homo sapiens
LLFLPPLLLLLDVPTAAVQASPLQALDFFGNGPPVNYKTGNLYLRGPLKKSNAPLVNVTLYYEALCGGCRAFLIRELFPTWLLVMEILNVTLVPYGNAQEQNVSGRWEFKCQHGEEECKFNKVEACVLDELDMELAFLTIVCMEEFEDMERSLPLCLQLYAPGLSPDTIMECAMGDRGMQLMHANAQRTDALQPPHEYVPWVTVNGKPLEDQTQLLTLVCQLYQGKKPDVCPSSTSSLRSVCFK

SEQ ID NO: 68237 - protein, 615 aa, Homo sapiens
LLLACGTLVAALLGAAHRLGLFYQLLHKVDKASVRHGGENVAAVLRAHGVRFIFTLVGGHISPLLVACEKLGIRVVDTRHEVTAVFAADAMARLSGTVGVAAVTAGPGLTNTVTAVKNAQMAQSPILLLGGAASTLLQNRGALQAVDQLSLFRPLCKFCVSVRRVRDIVPTLRAAMAAAQSGTPGPVFVELPVDVLYPYFMVQKEMVPAKPPKGLVGRVVSWYLENYLANLFAGAWEPQPEGPLPLDIPQASPQQVQRCVEILSRAKRPLMVLGSQALLTPTSADKLRAAVETLGVPCFLGGMARGLLGRNHPLHIRENRSAALKKADVIVLAGTVCDFRLSYGRVLSHSSKIIIVNRNREEMLLNSDIFWKPQEAVQGDVGSFVLKLVEGLQGQTWAPDWVEELREADRQKEQTFREKAAMPVAQHLNPVQVLQLVEETLPDNSILVVDGGDFVGTAAHLVQPRGPLRWLDPGAFGTLGVGAGFALGAKLCRPDAEVWCLFGDGAFGYSLIEFDTFVRHKIPVMALVGNDAGWTQISREQVPSLGSNVACGLAYTDYHKAAMGLGARGLLLSRENEDQVVKVLHDAQQQCRDGHPVVVNILIGRTDFRDGSIAV

SEQ ID NO: 68238 - protein, 251 aa, Homo sapiens
RPAAGAAMKKLMVVLSLIAAAWAEEQNKLVHGGPCDKTSHPYQAALYTSGHLLCGGVLIHPLWVLTAAHCKKPNLQVFLGKHNLRQRESSQEQSSVVRAVIHPDYDAASHDQDIMLLRLARPAKLSELIQPLPLERDCSANTTSCHILGWGKTADGDFPDTIQCAYIHLVSREECEHAYPGQITQNMLCAGDEKYGKDSCQGDSGGPLVCGDHLRGLVSWGNIPCGSKEKPGVYTNVCRYTNWIQKTIQAK

SEQ ID NO: 68239 - protein, 161 aa, Homo sapiens
TWVLQLTLAWILLEACGGSRPLQARSQQHHGLAADLGKGKLHLAGPCCPSEMDTTETSGPGNHPERCGVPSPECESFLEHLQRALRSRFRLRLLGVRQAQPLCEELCQAWFANCEDDITCGPTWLPLSEKRGCEPSCLTYGQAGVQWRDLSSMQPPPPGFK

SEQ ID NO: 68240 - protein, 39 aa, Homo sapiens
LFGLLSWYGTYGFWYPKAFSPGLPPQSCSLNLKQDSYKK

SEQ ID NO: 68241 - protein, 12 aa, Homo sapiens
LVATVAVGLYAM

SEQ ID NO: 68242 - protein, 183 aa, Homo sapiens
TGMMLRVLVGAVLPAMLLAAPPPINKLALFPDKSAWCEAKNITQIVGHSGCEAKSIQNRACLGQCFSYSVPNTFPQSTESLVHCDSCMPAQSMWEIVTLECPGHEEVPRVDKLVEKILHCSCQACGKEPSHEGLSVYVQGEDGPGSQPGTHPHPHPHPHPGGQTPEPEDPPGAPHTEEEGAED

SEQ ID NO: 68243 - protein, 37 aa, Homo sapiens
RRILFLFLFLFWPTAAAMALSSSAGVHPASWVPELPV

SEQ ID NO: 68244 - protein, 13 aa, Homo sapiens
LTCWFMILMMNEH

SEQ ID NO: 68245 - protein, 57 aa, Homo sapiens
LDSLIYGACVVFTLGMFSAGLSDLRHMRMTRSVDNVQFLPFLTTEVNVLCSYRLQPC

SEQ ID NO: 68246 - protein, 295 aa, Homo sapiens
IAVSFIAAFLFLLVVRLVNEVNFPLLLNCFGQPGTKWIPFSYTYRRPLRTHYGYINVKTQEPLQLDCDLCAIVSNSGQMVGQKVGNEIDRSSCIWRMNNAPTKGYEEDVGRMTMIRVVSHTSVPLLLKNPDYFFKEANTTIYVIWGPFRNMRKDGNGIVYNMLKKTVGIYPNAQIYVTTEKRMSYCDGVFKKETGKDRVQSGSYLSTGWFTFLLAMDACYGIHVYGMINDTYCKTEGYRKVPYHYYEQGRDECDEYFLHEHAPYGGHRFITEKKVFAKWAKKHRIIFTHPNWTLS

SEQ ID NO: 68247 - protein, 437 aa, Homo sapiens
LSAFLILHLVTVALSLSTCSTLDMDQFMRKRIEAIRGQILSKLKLTSPPEDYPEPEEVPPEVISIYNSTRDLLQEKASRRAAACERERSDEEYYAKEVYKIDMPPFFPSETVCPVVTTPSGSVGSLCSRQSQVLCGYLDAIPPTFYRPYFRIVRFDVSAMEKNASNLVKAEFRVFRLQNPKARVPEQRIELYQILKSKDLTSPTQRYIDSKVVKTRAEGEWLSFDVTDAVHEWLHHKDRNLGFKISLHCPCCTFVPSNNYIIPNKSEELEARFAGIDGTSTYTSGDQKTIKSTRKKNSGKTPHLLLMLLPSYRLESQQTNRRKKRALDAAYCFRNVQDNCCLRPLYIDFKRDLGWKWIHEPKGYNANFCAGACPYLWSSDTQHSRVLSLYNTINPEASASPCCVSQDLEPLTILYYIGKTPKIEQLSNMIVKSCKCS

SEQ ID NO: 68248 - protein, 906 aa, Homo sapiens
LPLLAALVLAQAPAALADVLEGDSSEDRAFRVRIAGDAPLQGVLGGALTIPCHVHYLRPPPSRRAVLGSPRVKWTFLSRGREAEVLVARGVRVKVNEAYRFRVALPAYPASLTDVSLALSELRPNDSGIYRCEVQHGIDDSSDAVEVKVKGVVFLYREGSARYAFSFSGAQEACARIGAHIATPEQLYAAYLGGYEQCDAGWLSDQTVRYPIQTPREACYGDMDGFPGVRNYGVVDPDDLYDVYCYAEDLNGELFLGDPPEKLTLEEARAYCQERGAEIATTGQLYAAWDGGLDHCSPGWLADGSVRYPIVTPSQRCGGGLPGVKTLFLFPNQTGFPNKHSRFNVYCFRDSAQPSAIPEASNPASNPASDGLEAIVTVTETLEELQLPQEATESESRGAIYSIPIMEDGGGGSSTPEDPAEAPRTLLEFETQSMVPPTGFSEEEGKALEEEEKYEDEEEKEEEEEEEEVEDEALWAWPSELSSPGPEASLPTEPAAQEESLSQAPARAVLQPGASPLPDGESEASRPPRVHGPPTETLPTPRERNLASPSPSTLVEAREVGEATGGPELSGVPRGESEETGSSEGAPSLLPATRAPEGTRELEAPSEDNSGRTAPAGTSVQAQPVLPTDSASRGGVAVVPASGDCVPSPCHNGGTCLEEEEGVRCLCLPGYGGDLCDVGLRFCNPGWDAFQGACYKHFSTRRSWEEAETQCRMYGAHLASISTPEEQDFINNRYREYQWIGLNDRTIEGDFLWSDGVPLLYENWNPGQPDSYFLSGENCVVMVWHDQGQWSDVPCNYHLSYTCKMGLVSCGPPPELPLAQVFGRPRLRYEVDTVLRYRCREGLAQRNLPLIRCQENGRWEAPQISCVPRRPARALHPEEDPEGRQGRLLGRWKALLIPPSSPMPGP

SEQ ID NO: 68249 - protein, 53 aa, Homo sapiens
IMLIFLGHYLIRHKGTYLTHEAKGSDDAPDADTAIINAEGGQSGGDDKKEYFI

SEQ ID NO: 68250 - protein, 36 aa, Homo sapiens
IIIFLICFLVLYALFLTLTTKLTNTNISDAQEIETV

SEQ ID NO: 68251 - protein, 329 aa, Homo sapiens
LWLLAVALLPWTCASRALQHLDPPAPLPLVIWHGMGSRYVAQTGLELLASSNPPASSYQSAGMIGDSCCNPLSMGAIKKMVEKKIPGIYVLSLEIGKTLMEDVENSFFLNVNSQVTTVCQALAKDPKLQQGYNAMGFSQGGQFLRAVAQRCPSPPMINLISVGGQHQGVFGLPRCPGESSHICDFIRKTLNAGAYSKVVQERLVQAEYWHDPIKEDVYRNHSIFLADINQERGINESYKKNLMALKKFVMVKFLNDSIVDPVDSEWFGFYRSGQAKETIPLQETSLYTQDRLGLKEMDNAGQLVFLATEGDHLQLSEEWFYAHIIPFLG

SEQ ID NO: 68252 - protein, 13 aa, Homo sapiens
VCILFSSNILLIL

SEQ ID NO: 68253 - protein, 32 aa, Homo sapiens
IKNLRWGKKALLSLTLIFCRYFVTQEDLIYSQ

SEQ ID NO: 68254 - protein, 47 aa, Homo sapiens
KYQLFLAGLMLVTGSINTLSAKWADNFMAEGCGGSKEHSFQHPFLQL

SEQ ID NO: 68255 - protein, 48 aa, Homo sapiens
TGRLLVGTFVALCFNLFTMLSIRNKPFAYVSEACVELFRDLAVSSFPE

SEQ ID NO: 68256 - protein, 324 aa, Homo sapiens
LPRVGCPALPLPPPPLLPLLLLLLGASGGGGGARAEVLFRCPPCTPERLAACGPPPVAPPAAVAAVAGGARMPCAELVREPGCGCCSVCARLEGEACGVYTPRCGQGLRCYPHPGSELPLQALVMGEGTCEKRRDAEYGASPEQVADNGDDHSEGGLVENHVDSTMNMLGGGGSAGRKPLKSGMKELAVFREKVTEQHRQMGKGGKHHLGLEEPKKLRPPPARTPCQQELDQVLERISTMRLPDERGPLEHLYSLHIPNCDKHGLYNLKQCKMSLNGQRGECWCVNPNTGKLIQGAPTIRGDPECHLFYNEQQEARGVHTQRMQ

SEQ ID NO: 68257 - protein, 7 aa, Homo sapiens
ILVIFVG

SEQ ID NO: 68258 - protein, 143 aa, Homo sapiens
LCWFRYVLYVTGYLLLKPCPETIKSLLIRRGLQVMNLENEFSPLNILEPFCLANAAYLGGQEMMEVVKRDDETIKEHLCKLTFYYGTIDPWCPKEYYEDIKKDFPEGDIRLCEKNIPHAFITHFNQEMADMIADSLKDDLSKM

SEQ ID NO: 68259 - protein, 18 aa, Homo sapiens
KTLLREWITTISGWLGLC

SEQ ID NO: 68260 - protein, 520 aa, Homo sapiens
LLLLSVLATVHVGQRLLRQRRRQLRSAPPGPFAWPLIGNAAAVGQAAHLSFARLARRYGDVFQIRLGSCPIVVLNGERAIHQALVQQGSAFADRPAFASFRVVSGGRSMAFGHYSEHWKVQRRAAHSMMRNFFTRQPRSRQVLEGHVLSEARELVALLVRGSADGAFLDPRPLTVVAVANVMSAVCFGCRYSHDDPEFRELLSHNEEFGRTVGAGSLVDVMPWLQYFPNPVRTVFREFEQLNRNFSNFILDKFLRHCESLRPGAAPRDMMDAFILSAEKKAAGDSHGGGARLDLENVPATITDIFGASQDTLSTALQWLLLLFTRYPDVQTRVQAELDQVVGRDRLPCMGDQPNLPYVLAFLYEAMRFSSFVPVTIPHATTANTSVLGYHIPKDTVVFVNQWSVNHDPLKWPNPENFDPARFLDKDGLINKDLTSRVMIFSVGKRRCIGEELSKMQLFLFISILAHQCDFRANPNEPAKMNFSYGLTIKPKSFKVNVTLRESMELLDSAVQNLQAKETCQ

SEQ ID NO: 68261 - protein, 434 aa, Homo sapiens
VVALVLLNVAAAGAVPLLATESVKQEEAGVRPSAGNVSTHPSLSQRPGGSTKSHPEPQTPKDSPSKSSAEAQTPEDTPNKSGAEAKTQKDSSNKSGAEAKTQKGSTSKSGSEAQTTKDSTSKSHPELQTPKDSTGKSGAEAQTPEDSPNRSGAEAKTQKDSPSKSGSEAQTTKDVPNKSGADGQTPKDGSSKSGAEDQTPKDVPNKSGAEKQTPKDGSNKSGAEEQGPIDGPSKSGAEEQTSKDSPNKVVPEQPSRKDHSKPISNPSDNKELPKADTNQLADKGKLSPHAFKTESGEETDLISPPQEEVKSSEPTEDVEPKEAEDDDTGPEEGSPPKEEKEKMSGSASSENREGTLSDSTGSEKDDLYPNGSGNGSAESSHFFAYLVTAAILVAVLYIAHHNKRKIIAFVLEGKRSKVTRRPKASDYQRLDQKS

SEQ ID NO: 68262 - protein, 180 aa, Homo sapiens
LSCLLAVAYVSSVALAVASVAVIHQSLGLSCIPTPGPPDLGLTSRCLLEPCIPSVPQCLPSLANVSSCLEGSMGLRSLWGSLLASLTPPPLPPPDPPAPPTLLHNCHLCQKLQRDSPTCHACLHPNRTVPTALSSPWYHTYGLAPPWPWSPVLLSLPQPQQCSLFSVMELARLKSFVFPG

SEQ ID NO: 68263 - protein, 38 aa, Homo sapiens
LFCFKLFVLWSRGAVHTFVDDAKRNHPTKFCLWKVTMK

SEQ ID NO: 68264 - protein, 1214 aa, Homo sapiens
IVYLMFLLLKFSKAIEIPSSVQQVPTIIKQSKVQVAFPFDEYFQIECEAKGNPEPTFSWTKDGNPFYFTDHRIIPSNNSGTFRIPNEGHISHFQGKYRCFASNKLGIAMSEEIEFIVPSVPKFPKEKIDPLEVEEGDPIVLPCNPPKGLPPLHIYWMNIELEHIEQDERVYMSQKGDLYFANVEEKDSRNDYCCFAAFPRLRTIVQKMPMKLTVNSLKHANDSSSSTEIGSKANSIKQRKPKLLLPPTESGSESSITILKGEILLLECFAEGLPTPQVDWNKIGGDLPKGRETKENYGKTLKIENVSYQDKGNYRCTASNFLGTATHDFHVIVEEPPRWTKKPQSAVYSTGSNGILLCEAEGEPQPTIKWRVNGSPVDNHPFAGDVVFPREISFTNLQPNHTAVYQCEASNVHGTILANANIDVVDVRPLIQTKDGENYATVVGYSAFLHCEFFASPEAVVSWQKVEEVKPLEGRRYHIYENGTLQINRTTEEDAGSYSCWVENAIGKTAVTANLDIRNATKLRVSPKNPRIPKLHMLELHCESKCDSHLKHSLKLSWSKDGEAFEINGTEDGRIIIDGANLTISNVTLEDQGIYCCSAHTALDSAADITQVTVLDVPDPPENLHLSERQNRSVRLTWEAGADHNSNISEYIVEFEGNKEEPGRWEELTRVQGKKTTVILPLAPFVRYQFRVIAVNEVGRSQPSQPSDHHETPPAAPDRNPQNIRVQASQPKEMIIKWEPLKSMEQNGPGLEYRVTWKPQGAPVEWEEETVTNHTLRVMTPAVYAPYDVKVQAINQLGSGPDPQSVTLYSGEDYPDTAPVIHGVDVINSTLVKVTWSTVPKDRVHGRLKGYQINWWKTKSLLDGRTHPKEVNILRFSGQRNSGMVPSLDAFSEFHLTVLAYNSKGAGPESEPYIFQTPEGVPEQPTFLKVIKVDKDTATLSWGLPKKLNGNLTGYLLQYQIINDTYEIGELNDINITTPSKPSWHLSNLNATTKYKFYLRACTSQGCGKPITEESSTLGEGSKGIGKISGVNLTQKTHPIEVFEPGAEHIVRLMTKNWGDNDSIFQDVIETRGREYAGLYDDISTQGWFIGLMCAIALLTLLLLTVCFVKRNRGGKYSVKEKEDLHPDPEIQSVKDETFGEYSDSDEKPLKGSLRSLNRDMQPTESADSLVEYGEGDHGLFSEDGSFIGAYAGSKEKGSVESNGSSTATFPLRA

SEQ ID NO: 68265 - protein, 30 aa, Homo sapiens
MAAISLGGFIFLGAYDRTHSLLLEVGRKSP

SEQ ID NO: 68266 - protein, 586 aa, Homo sapiens
RRNMESKGASSCRLLFCLLISATVFRPGLGWYTVNSAYGDTIIIPCRLDVPQNLMFGKWKYEKPDGSPVFIAFRSSTKKSVQYDDVPEYKDRLNLSENYTLSISNARISDEKRFVCMLVTEDNVFEAPTIVKVFKQPSKPEIVSKALFLETEQLKKLGDCISEDSYPDGNITWYRNGKVLHPLEGAVVIIFKKEMDPVTQLYTMTSTLEYKTTKADIQMPFTCSVTYYGPSGQKTIHSEQAVFDIYYPTEQVTIQVLPPKNAIKEGDNITLKCLGNGNPPPEEFLFYLPGQPEGIRSSNTYTLTDVRRNATGDYKCSLIDKKSMIASTAITVHYLDLSLNPSGEVTRQIGDALPVSCTISASRNATVVWMKDNIRLRSSPSFSSLHYQDAGNYVCETALQEVEGLKKRESLTLIVEGKPQIKMTKKTDPSGLSKTIICHVEGFPKPAIQWTITGSGSVINQTEESPYINGRYYSKIIISPEENVTLTCTAENQLERTVNSLNVSAISIPEHDEADEISDENREKVNDQAKLIVGIVVGLLLAALVAGVVYWLYMKKSKTASKHVNKDLGNMEENKKLEENNHKTEA

SEQ ID NO: 68267 - protein, 37 aa, Homo sapiens
LSWFNWCLPGSCLLSLLLILCFRESYDRLYLDVVVSV

SEQ ID NO: 68268 - protein, 44 aa, Homo sapiens
VFFIACVSLSLLSVVLLYLVNRAQGGNLNYSARQREEIKFSHTE

SEQ ID NO: 68269 - protein, 34 aa, Homo sapiens
MWPHLLLLLLQQLRPEQARWQKGALLPSLFPEAQ

SEQ ID NO: 68270 - protein, 1314 aa, Homo sapiens
LYLFAVLFDLLVSESSLDHLMAMGDDKSFDDEESVDGNRPSSAASAFKVPAPKTSGNPANSARKPGSAGGPKVGGASKEGGAGAVDEDDFIKAFTDVPSIQIYSSRELEETLNKIREILSDDKHDWDQRANALKKIRSLLVAGAAQYDCFFQHLRLLDGALKLSAKDLRSQVVREACITVAHLSTVLGNKFDHGAEAIVPTLFNLVPNSAKVMATSGCAAIRFIIRHTHVPRLIPLITSNCTSKSVPVRRRSFEFLDLLLQEWQTHSLERHAAVLVETIKKGIHDADAEARVEARKTYMGLRNHFPGEAETLYNSLEPSYQKSLQTYLKSSGSVASLPQSDRSSSSSQESLNRPFSSKWSTANPSTVAGRVSAGSSKASSLPGSLQRSRSDIDVNAAAGAKAHHAAGQSVRSGRLGAGALNAGSYASLEDTSDKLDGTASEDGRVRAKLSAPLAGMGNAKADSRGRSRTKMVSQSQPGSRSGSPGRVLTTTALSTVSSGVQRVLVNSASAQKRSKIPRSQGCSREASPSRLSVARSSRIPRPSVSQGCSREASRESSRDTSPVRSFQPLASRHHSRSTGALYAPEVYGASGPGYGISQSSRLSSSVSAMRVLNTGSDVEEAVADALKKPARRRYESYGMHSDDDANSDASSACSERSYSSRNGSIPTYMRQTEDVAEVLNRCASSNWSERKEGLLGLQNLLKNQRTLSRVELKRLCEIFTRMFADPHGKRVFSMFLETLVDFIQVHKDDLQDWLFVLLTQLLKKMGADLLGSVQAKVQKALDVTRESFPNDLQFNILMRFTVDQTQTPSLKVKVAILKYIETLAKQMDPGDFINSSETRLAVSRVITWTTEPKSSDVRKAAQSVLISLFELNTPEFTMLLGALPKTFQDGATKLLHNHLRNTGNGTQSSMGSPLTRPTPRSPANWSSPLTSPTNTSQNTLSPSAFDYDTENMNSEDIYSSLRGVTEAIQNFSFRSQEDMNEPLKRDSKKDDGDSMCGGPGMSDPRAGGDATDSSQTALDNKASLLHSMPTHSSPRSRDYNPYNYSDSISPFNKSALKEAMFDDDADQFPDDLSLDHSDLVAELLKELSNHNERVEERKIALYELMKLTQEESFSVWDEHFKTILLLLLETLGDKEPTIRALALKVLREILRHQPARFKNYAELTVMKTLEAHKDPHKEVVRSAEEAASVLATSISPEQCIKVLCPIIQTADYPINLAAIKMQTKVIERVSKETLNLLLPEIMPGLIQGYDNSESSVRKACVFCLVAVHAVIGDELKPHLSQLTGSKMKLLNLYIKRAQTGSGGADPTTDVSGQS

SEQ ID NO: 68271 - protein, 19 aa, Homo sapiens
VLLLLFTLLLGFYEGFVKS

SEQ ID NO: 68272 - protein, 31 aa, Homo sapiens
IEFILCLIQVINGVLGGICGFCCSHQQQYDC

SEQ ID NO: 68273 - protein, 29 aa, Homo sapiens
ILSIVCLMITQLAGFSGPNFQDGCILRSE

SEQ ID NO: 68274 - protein, 14 aa, Homo sapiens
KFVKLVSLTLLLRL

SEQ ID NO: 68275 - protein, 35 aa, Homo sapiens
LLVLGAFSFGAAALSGICLELPARKVHQLDNGGEQ

SEQ ID NO: 68276 - protein, 96 aa, Homo sapiens
LMVLVFTIGLTLLLGVQAMPANRLSCYRKILKDHNCHNLPEGVADLTQIDVNVQDHFWDGKGCEMICYCNFSELLCCPKDVFFGPKISFVIPCNNQ

SEQ ID NO: 68277 - protein, 38 aa, Homo sapiens
ISNRTLGLIVFLGIVLGNLWKEKKTDKTKKGIENKIEN

SEQ ID NO: 68278 - protein, 21 aa, Homo sapiens
MLTGFTAILLITLYAGEIELE

SEQ ID NO: 68279 - protein, 465 aa, Homo sapiens
LLLLVTSVTLLVARVFQKAVDQSIEKKIVLRNGTEAFDSWEKPPLPVYTQFYFFNVTNPEEILRGETPRVEEVGPYTYRELRNKANIQFGDNGTTISAVSNKAYVFERDQSVGDPKIDLIRTLNIPVLTVIEWSQVHFLREIIEAMLKAYQQKLFVTHTVDELLWGYKDEILSLIHVFRPDISPYFGLFYEKNGTNDGDYVFLTGEDSYLNFTKIVEWNGKTSLDWWITDKCNMINGTDGDSFHPLITKDEVLYVFPSDFCRSVYITFSDYESVQGLPAFRYKVPAEILANTSDNAGFCIPEGNCLGSGVLNVSICKNGAPIIMSFPHFYQADERFVSAIEGMHPNQEDHETFVDINPLTGIILKAAKRFQINIYVKKLDDFVETGDIRTMVFPVMYLNESVHIDKETASRLKSMINTTLIITNIPYIIMALGVFFGLVFTWLACKGQGSMDEGTADERAPLIRT

SEQ ID NO: 68280 - protein, 976 aa, Homo sapiens
VDMAGRVPSLLVLLVFPSSCLAFRSPLSVFKRFKETTRPFSNECLGTTRPVVPIDSSDFALDIRMPGVTPKQSDTYFCMSMRIPVDEEAFVIDFKPRASMDTVHHMLLFGCNMPSSTGSYWFCDEGTCTDKANILYAWARNAPPTRLPKGVGFRVGGETGSKYFVLQVHYGDISAFRDNNKDCSGVSLHLTRLPQPLIAGMYLMMSVDTVIPAGEKVVNSDISCHYKNYPMHVFAYRVHTHHLGKVVSGYRVRNGQWTLIGRQSPQLPQAFYPVGHPVDVSFGDLLAARCVFTGEGRTEATHIGGTSSDEMCNLYIMYYMEAKHAVSFMTCTQNVAPDMFRTIPPEANIPIPVKSDMVMMHEHHKETEYKDKIPLLQQPKREEEEVLDQGDFYSLLSKLLGEREDVVHVHKYNPTEKAESESDLVAEIANVVQKKDLGRSDAREGAEHERGNAILVRDRIHKFHRLVSTLRPPESRVFSLQQPPPGEGTWEPEHTGDFHMEEALDWPGVYLLPGQVSGVALDPKNNLVIFHRGDHVWDGNSFDSKFVYQQIGLGPIEEDTILVIDPNNAAVLQSSGKNLFYLPHGLSIDKDGNYWVTDVALHQVFKLDPNNKEGPVLILGRSMQPGSDQNHFCQPTDVAVDPGTGAIYVSDGYCNSRIVQFSPSGKFITQWGEESSGSSPLPGQFTVPHSLALVPLLGQLCVADRENGRIQCFKTDTKEFVREIKHSSFGRNVFAISYIPGLLFAVNGKPHFGDQEPVQGFVMNFSNGEIIDIFKPVRKHFDMPHDIVASEDGTVYIGDAHTNTVWKFTLTEKLEHRSVKKAGIEVQEIKEAEAVVETKMENKPTSSELQKMQEKQKLIKEPGSGVPVVLITTLLVIPVVVLLAIAIFIRWKKSRAFGADSEHKLETSSGRVLGRFRGKGSGGLNLGNFFASRKGYSRKGFDRLSTEGSDQEKEDDGSESEEEYSAPLPALAPSSS

SEQ ID NO: 68281 - protein, 218 aa, Homo sapiens
LGRVMRTLLLVLWLATRGSALYFHIGETEKKCFIEEIPDETMVIGNYRTQLYDKQREEYQPATPGLGMFVEVKDPEDKVILARQYGSEGRFTFTSHTPGEHQICLHSNSTKFSLFAGGMLRVHLDIQVGEHANDYAEIAAKDKLSELQLRVRQLVEQVEQIQKEQNYQRWREERFRQTSESTNQRVLWWSILQTLILVAIGVWQMRHLKSFFEAKKLV

SEQ ID NO: 68282 - protein, 205 aa, Homo sapiens
LLPLVLCVGLGALVFSSGAEGFRKRGPSVTAKVFFDVRIGDKDVGRIVIGLFGKVVPKTVENFVALATGEKGYGYKGSKFHRVIKDFMIQGGDITTGDGTGGVSIYGETFPDENFKLKHYGIGWVSMANAGPDTNGSQFFITLTKPTWLDGKHVVFGKVIDGMTVVHSIELQATDGHDRPLTNCSIINSGKIDVKTPFVVEIADW

SEQ ID NO: 68283 - protein, 46 aa, Homo sapiens
VVGILVGLGIIALVTSPLLLLASPCIICCVCKSCRGKKKKHDPSTT

SEQ ID NO: 68284 - protein, 12 aa, Homo sapiens
ISILKLVLEILF

SEQ ID NO: 68285 - protein, 37 aa, Homo sapiens
KRIMGSRAELCTLLGGFSFLLLLIPGEGAKGGSLRER

SEQ ID NO: 68286 - protein, 250 aa, Homo sapiens
LGKLLGTVVALKVVLYLLRVCLAMAWKSGGASHSELIHNLRKNGIIKTDKVFEVMLATDRSHYAKCNPYMDSPQSIGFQATISAPHMHAYALELLFDQLHEGAKALDVGSGSGILTACFARMVGCTGKVIGIDHIKELVDDSVNNVRKDDPTLLSSGRVQLVVGDGRMGYAEEAPYDAIHVGAAAPVVPQALIDQLKPGGRLILPVGPAGGNQMLEQYDKLQDGSIKMKPLMGVIYVPLTDKEKQWSRWK

SEQ ID NO: 68287 - protein, 251 aa, Homo sapiens
LGKLLGTVVALKVVLYLLRVCLAMAWKSGGASHSELIHNLRKNGIIKTDKVFEVMLATDRSHYAKCNPYMDSPQSIGFQATISAPHMHAYALELLFDQLHEGAKALDVGSGSGILTACFARMVGCTGKVIGIDHIKELVDDSVNNVRKDDPTLLSSGRVQLVVGDGRMGYAEEAPYDAIHVGAAAPVVPQALIDQLKPGGRLILPVGPAGGNQMLEQYDKLQDGSIKMKPLMGVIYVPLTDKEKQWSRDEL

SEQ ID NO: 68288 - protein, 33 aa, Homo sapiens
ISLLIILFLPMKPQAHTQRRPQTLNSINKRKTD

SEQ ID NO: 68289 - protein, 124 aa, Homo sapiens
VLIFFWCLAFLWGLLILLKYRWRKLEEEEQAMYEMVKKIIDVVQDHYVDWEQDMERYPYVGILHVRDSLIPPQSRRRMKRVWDRAVEFLASNESRIQTESHRVAGEDMLVWRWTKPSSFSDSER

SEQ ID NO: 68290 - protein, 31 aa, Homo sapiens
LSAFLLLGLFKALGWAAVYLSTCKDSKKKAE

SEQ ID NO: 68291 - protein, 13 aa, Homo sapiens
VDHFGFLFCVWQF

SEQ ID NO: 68292 - protein, 473 aa, Homo sapiens
LACLALDLLFLLFYSFWLCCRRRKSEEHLDADCCCTAWCVIIATLVCSAGIAVGFYGNGETSDGIHRATYSLRHANRTVAGVQDRVWDTAVGLNHTAEPSLQTLERQLAGRPEPLRAVQRLQGLLETLLGYTAAIPFWRNTAVSLEVLAEQVDLYDWYRWLGYLGLLLLDVIICLLVLVGLIRSSKGILVGVCLLGVLALVISWGALGLELAVSVGSSDFCVDPDAYVTKMVEEYSVLSGDILQYYLACSPRAANPFQQKLSGSHKALVEMQDVVAELLRTVPWEQPATKDPLLRVQEVLNGTEVNLQHLTALVDCRSLHLDYVQALTGFCYDGVEGLIYLALFSFVTALMFSSIVCSVPHTWQQKRGPDEDGEEEAAPGPRQAHDSLYRVHMPSLYSCGSSYGSETSIPAAAHTVSNAPVTEYMSQNANFQNPRCENTPLIGRESPPPSYTSSMRAKYLATSQPRPDSSGSH

SEQ ID NO: 68293 - protein, 34 aa, Homo sapiens
KSSVKAVILKDSKVFPLLLCITLNGLCALGREHS

SEQ ID NO: 68294 - protein, 27 aa, Homo sapiens
RCLSYFARRLSKWGCCLLSLVVTSLAH

SEQ ID NO: 68295 - protein, 637 aa, Homo sapiens
ISLWICVQIVIEMQGFATVLAEAVTSLDLPVAIINLKEYDPDDHLIEEVTSKNVCVFLVATYTDGLPTESAEWFCKWLEEASIDFRFGKTYLKGMRDAVFGLGNSAYASHFNKVGKNVDKWLWMLGVHRVMSRGEGDCDVVKSKHGSIEANFRAWKTKFISQLQALQKGERKKSCGGHCKKGKCESHQHGSEEREEGSQEQDELHHRDTKEEEPFESSSEEEFGGEDHQSLNSIVDVEDLGKIMDHVKKEKREKEQQEEKSGLFRNMGRNEDGERRAMITPALREALTKQVDAPRERSLLQTHILWNESHRCMETTPSLACANKCVFCWWHHNNPVGTEWLWKMDQPEMILKEAIENHQNMIKQFKGVPGVKAERFEEGMTVKHCALSLVGEPIMYPEINRFLKLLHQCKISSFLVTNAQFPAEIRNLEPVTQLYVSVDASTKDSLKKIDRPLFKDFWQQFLDSLKALAVKQQRTVYRLMLVKAWNVDELQAYAQLVSLGNPDFIEVKGVTYCRESSASSLTMAHVPWHEEVVQFVRELVDLIPEYEIACEHEHSNCLLIAHRKFKIGGEWWTWIDYNRFQELIQEYEDSGGSKTFSAKDYMARTPHWALFGANERSFDPKDTRHQRKNKSKAISGC

SEQ ID NO: 68296 - protein, 312 aa, Homo sapiens
MSFEDVLLVFSAVVFGAMAVGQVSSFAPDYAKAKISAAHIIMIIEKTPLIDSYSTEGLMPNTLEGNVTFGEVVFNYPTRPDIPVLQGLSLEVKKGQTLALVGSSGCGKSTVVQLLERFYDPLAGKVLLDGKEIKRLNVQWLRAHLGIVSQEPILFDCSIAENIAYGDNSRVVSQEEIVRAAKEANIHAFIESLPNKYSTKVGDKGTQLSGGQKQRIAIARALVRQPHILLLDEATSALDTESEKVVQEALDKAREGRTCIVIAHRLSTIQNADLIVVFQNGRVKEHGTHQQLLAQKGIYFSMVSVQAGTKRQ

SEQ ID NO: 68297 - protein, 218 aa, Homo sapiens
VVAVAVFLLTFYVISQVFEIKMDASLGNLFARSALDTAARSTKPPRYKCGISKACPEKHFAFKMASGAANVVGPKICLEDNVLMSGVKNNVGRGINVALANGKTGEVLDTKYFDMWGGDVAPFIEFLKAIQDGTIVLMGTYDDGATKLNDEARRLIADLGSTSITNLGFRDNWVFCGGKGIKTKSPFEQHIKNNKDTNKYEGWPEVVEMEGCIPQKQD

SEQ ID NO: 68298 - protein, 47 aa, Homo sapiens
IYVSLGIVGLAILALLAVTSIPSVSDSLTWREFHYIQVHGRINFLTL

SEQ ID NO: 68299 - protein, 639 aa, Homo sapiens
LLLLLLGLVQLLAVAGAEGPDEDSSNRENAIEDEEEEEEEDDDEEEDDLEVKEENGVLVLNDANFDNFVADKDTVLLEFYAPWCGHCKQFAPEYEKIANILKDKDPPIPVAKIDATSASVLASRFDVSGYPTIKILKKGQAVDYEGSRTQEEIVAKVREVSQPDWTPPPEVTLVLTKENFDEVVNDADIILVEFYAPWCGHCKKLAPEYEKAAKELSKRSPPIPLAKVDATAETDLAKRFDVSGYPTLKIFRKGRPYDYNGPREKYGIVDYMIEQSGPPSKEILTLKQVQEFLKDGDDVIIIGVFKGESDPAYQQYQDAANNLREDYKFHHTFSTEIAKFLKVSQGQLVVMQPEKFQSKYEPRSHMMDVQQGSTQDSAIKDFVLKYALPLVGHRKVSNDAKRYTRRPLVVVYYSVDFSFDYRAATQFWRSKVLEVAKDFPEYTFAIADEEDYAGEVKDLGLSESGEDVNAAILDESGKKFAMEPEEFDSDTLREFVTAFKKGKLKPVIKSQPVPKNNKGPVKVVVGKTFDSIVMDPKKDVLIEFYAPWCGHCKQLEPVYNSLAKKYKGQKGLVIAKMDATANDVPSDRYKVEGFPTIYFAPSGDKKNPVKFEGGDRDLEHLSKFIEEHATKLSRTKEEL

SEQ ID NO: 68300 - protein, 276 aa, Homo sapiens
KSGLSRGRKVMLSALGMLAAGGAGLAMALHSAVSASDLELHPPSYPWSHRGLLSSLDHTSIRRGFQVYKQVCASCHSMDFVAYRHLVGVCYTEDEAKELAAEVEVQDGPNEDGEMFMRPGKLFDYFPKPYPNSEAARAANNGALPPDLSYIVRARHGGEDYVFSLLTGYCEPPTGVSLREGLYFNPYFPGQAIAMAPPIYTDVLEFDDGTPATMSQIAKDVCTFLRWASEPEHDHRKRMGLKMLMMMALLVPLVYTIKRHKWSVLKSRKLAYRPPK

SEQ ID NO: 68301 - protein, 111 aa, Homo sapiens
MQSVQSTSFCLRKQCLCLTFLLLHLLGQVAATQRCPPQCPGRCPATPPTCAPGVRAVLDGCSCCLVCARQRGESCSDLEPCDESSGLYCDRSADPSNQTGICTGNPAPSAV

SEQ ID NO: 68302 - protein, 407 aa, Homo sapiens
IFFVITFLIFLCSSCDREKKPRQHSGDHENLMNVPSDKEMFSRSVTSLATDAPASSEQNGALTNGDILSEDSTLTCMQHYEEVQTSASDLLDSQDSTGKPKCHQSRELPRIPPESAVDTMLTARSVDGDQGLGMEGPYEVLKDSSSQENMVEDCLYETVKEIKEVAAAAHLEKGHSGKAKSTSASKELPGPQTEGKAEFAEYASVDRNKKCRQSVNVESILGNSCDPEEEAPPPVPVKLLDENENLQEKEGGEAEESATDTTSETNKRFSSLSYKSREEDPTLTEEEISAMYSSVNKPGQLVNKSGQSLTVPESTYTSIQGDPQRSPSSCNDLYATVKDFEKTPNSTLPPAGRPSEEPEPDYEAIQTLNREEEKATLGTNGHHGLVPKENDYESISDLQQGRDITRL

SEQ ID NO: 68303 - protein, 12 aa, Homo sapiens
LWRNTFCILCLI

SEQ ID NO: 68304 - protein, 328 aa, Homo sapiens
ILAAFCLGIASATLTFDHSLEAQWTKWKAMHNRLYGMNEEGWRRAVWEKNMKMIELHNQEYREGKHSFTMAMNAFGDMTSEEFRQVMNGFQNRKPRKGKVFQEPLFYEAPRSVDWREKGYVTPVKNQGQCGSCWAFSATGALEGQMFRKTGRLISLSEQNLVDCSGPQGNEGCNGGLMDYAFQYVQDNGGLDSEESYPYEATEESCKYNPKYSVANDTGFVDIPKQEKALMKAVATVGPISVAIDAGHESFLFYKEGIYFEPDCSSEDMDHGVLVVGYGFESTESDNNKYWLVKNSWGEEWGMGGYVKMAKDRRNHCGIASAASYPTV

SEQ ID NO: 68305 - protein, 51 aa, Homo sapiens
VFGGYYIRLLVTSQLPQAMGTRHTNSPRIPCPCQLIEAYILGTGCCPFLAR

SEQ ID NO: 68306 - protein, 18 aa, Homo sapiens
IILSVFIPSFFLENFSIL

SEQ ID NO: 68307 - protein, 29 aa, Homo sapiens
IFSVLFTLFCVPETKGKTLEQITAHFEGR

SEQ ID NO: 68308 - protein, 541 aa, Homo sapiens
ISSRMSAPKLLSLGCIFFPLLLFQQARAQFPRQCATVEALRSGMCCPDLSPVSGPGTDRCGSSSGRGRCEAVTADSRPHSPQYPHDGRDDREVWPLRFFNRTCHCNGNFSGHNCGTCRPGWRGAACDQRVLIVRRNLLDLSKEEKNHFVRALDMAKRTTHPLFVIATRRSEEILGPDGNTPQFENISIYNYFVWTHYYSVKKTFLGVGQESFGEVDFSHEGPAFLTWHRYHLLRLEKDMQEMLQEPSFSLPYWNFATGKNVCDICTDDLMGSRSNFDSTLISPNSVFSQWRVVCDSLEDYDTLGTLCNSTEDGPIRRNPAGNVARPMVQRLPEPQDVAQCLEVGLFDTPPFYSNSTNSFRNTVEGYSDPTGKYDPAVRSLHNLAHLFLNGTGGQTHLSPNDPIFVLLHTFTDAVFDEWLRRYNADISTFPLENAPIGHNRQYNMVPFWPPVTNTEMFVTAPDNLGYTYEIQWPSREFSVPEIIAIAVVGALLLVALIFGTASYLIRARRSMDEANQPLLTDQYQCYAEEYEKLQNPNQSVV

SEQ ID NO: 68309 - protein, 36 aa, Homo sapiens
LDTSSLKTLHLGTLFFLFYLALTQNEENICDGKVTL

SEQ ID NO: 68310 - protein, 81 aa, Homo sapiens
IIVVVLLMGFVGAVYMYREYQNRKLNAPFWTIELKEDNISFSSYHDSIPNADVSGLLEDDGNEVAPNGQLTLTTPIHNYKA

SEQ ID NO: 68311 - protein, 24 aa, Homo sapiens
IGALLTAALWYIYSHTREYPRPPQ

SEQ ID NO: 68312 - protein, 649 aa, Homo sapiens
VAAMLLLLSAARAEEEDKKEDVGTVVGIDLGTTYSCVGVFKNGRVEIIANDQGNRITPSYVAFTPEGERLIGDAAKNQLTSNPENTVFDAKRLIGRTWNDPSVQQDIKFLPFKVVEKKTKPYIQVDIGGGQTKTFAPEEISAMVLTKMKETAEAYLGKKVTHAVVTVPAYFNDAQRQATKDAGTIAGLNVMRIINEPTAAAIAYGLDKREGEKNILVFDLGGGTFDVSLLTIDNGVFEVVATNGDTHLGGEDFDQRVMEHFIKLYKKKTGKDVRKDNRAVQKLRREVEKAKRALSSQHQARIEIESFYEGEDFSETLTRAKFEELNMDLFRSTMKPVQKVLEDSDLKKSDIDEIVLVGGSTRIPKIQQLVKEFFNGKEPSRGINPDEAVAYGAAVQAGVLSGDQDTGDLVLLDVCPLTLGIETVGGVMTKLIPRNTVVPTKKSQIFSTASDNQPTVTIKVYEGERPLTKDNHLLGTFDLTGIPPAPRGVPQIEVTFEIDVNGILRVTAEDKGTGNKNKITITNDQNRLTPEEIERMVNDAEKFAEEDKKLKERIDTRNELESYAYSLKNQIGDKEKLGGKLSSEDKETMEKAVEEKIEWLESHQDADIEDFKAKKKELEEIVQPIISKLYGSAGPPPTGEEDTAEKDEL

SEQ ID NO: 68313 - protein, 19 aa, Homo sapiens
LALLTGALWLMNELRRVPK

SEQ ID NO: 68314 - protein, 15 aa, Homo sapiens
ILCLLLLGVLNLETM

SEQ ID NO: 68315 - protein, 793 aa, Homo sapiens
IFWIGLISSVCCVFAQTDENRCLKANAKSCGECIQAGPNCGWCTNSTFLQEGMPTSARCDDLEALKKKGCPPDDIENPRGSKDIKKNKNVTNRSKGTAEKLKPEDITQIQPQQLVLRLRSGEPQTFTLKFKRAEDYPIDLYYLMDLSYSMKDDLENVKSLGTDLMNEMRRITSDFRIGFGSFVEKTVMPYISTTPAKLRNPCTSEQNCTSPFSYKNVLSLTNKGEVFNELVGKQRISGNLDSPEGGFDAIMQVAVCGSLIGWRNVTRLLVFSTDAGFHFAGDGKLGGIVLPNDGQCHLENNMYTMSHYYDYPSIAHLVQKLSENNIQTIFAVTEEFQPVYKELKNLIPKSAVGTLSANSSNVIQLIIDAYNSLSSEVILENGKLSEGVTISYKSYCKNGVNGTGENGRKCSNISIGDEVQFEISITSNKCPKKDSDSFKIRPLGFTEEVEVILQYICECECQSEGIPESPKCHEGNGTFECGACRCNEGRVGRHCECSTDEVNSEDMDAYCRKENSSEICSNNGECVCGQCVCRKRDNTNEIYSGKFCECDNFNCDRSNGLICGGNGVCKCRVCECNPNYTGSACDCSLDTSTCEASNGQICNGRGICECGVCKCTDPKFQGQTCEMCQTCLGVCAEHKECVQCRAFNKGEKKDTCTQECSYFNITKVESRDKLPQPVQPDPVSHCKEKDVDDCWFYFTYSVNGNNEVMVHVVENPECPTGPDIIPIVAGVVAGIVLIGLALLLIWKLLMIIHDRREFAKFEKEKMNAKWDTGENPIYKSAVTTVVNPKYEGK

SEQ ID NO: 68316 - protein, 44 aa, Homo sapiens
LLLGVTLFITVLVLFALQAYESYKKKDYTQVDYLINGMYADSEM

SEQ ID NO: 68317 - protein, 49 aa, Homo sapiens
IAFTGVVGFLLGTYITVEEIIYPTPKVVAGTPQSPFLNLNSTCLTSGLK

SEQ ID NO: 68318 - protein, 130 aa, Homo sapiens
LLAALLLLLSGDGAVRCDTPANCTYLDLLGTWVFQVGSSGSQRDVNCSVMGPQEKKVVVYLQKLDTAYDDLGNSGHFTIIYNQGFEIVLNDYKWFAFFKDVTDFISHLFMQLGTVGIYDLPHLRNKLVIK

SEQ ID NO: 68319 - protein, 658 aa, Homo sapiens
LLGLLLLGLLLPASLTGGVGSLNLEELSEMRYGIEILPLPVMGGQSQSSDVVIVSSKYKQRYECRLPAGAIHFQREREEETPAYQGPGIPELLSPMRDAPCLLKTKDWWTYEFCYGRHIQQYHMEDSEIKGEVLYLGYYQSAFDWDDETAKASKQHRLKRYHSQTYGNGSKCDLNGRPREAEVRFLCDEGAGISGDYIDRVDEPLSCSYVLTIRTPRLCPHPLLRPPPSAAPQAILCHPSLQPEEYMAYVQRQADSKQYGDKIIEELQDLGPQVWSETKSGVAPQKMAGASPTKDDSKDSDFWKMLNEPEDQAPGGEEVPAEEQDPSPEAADSASGAPNDFQNNVQVKVIRSPADLIRFIEELKGGTKKGKPNIGQEQPVDDAAEVPQREPEKERGDPERQREMEEEEDEDEDEDEDEDERQLLGEFEKELEGILLPSDRDRLRSEVKAGMERELENIIQETEKELDPDGLKKESERDRAMLALTSTLNKLIKRLEEKQSPELVKKHKKKRVVPKKPPPSPQPTEEDPEHRVRVRVTKLRLGGPNQDLTVLEMKRENPQLKQIEGLVKELLEREGLTAAGKIEIKIVRPWAEGTEEGARWLTDEDTRNLKEIFFNILVPGAEEAQKERQRQKELESNYRRVWGSPGGEGTGDLDEFDF

SEQ ID NO: 68320 - protein, 571 aa, Homo sapiens
LLGLLLLGLLLPASLTGGVGSLNLEELSEMRYGIEILPLPVMGGQSQSSDVVIVSSKYKQRYECRLPAGAIHFQREREEETPAYQGPGIPELLSPMRDAPCLLKTKDWWTYEFCYGRHIQQYHMEDSEIKGEVLYLGYYQSAFDWDDETAKFLCDEGAGISGDYIDRVDEPLSCSYVLTIRTPRLCPHPLLRPPPSAAPQAILCHPSLQPEEYMAYVQRQAVDSKQYGDKIIEELQDLGPQVWSETKSGVAPQKMAGASPTKDDSKDSDFWKMLNEPEDQAPGGEEVPAEEQDPSPEAADSASGAPNDFQNNVQVKVIRSPADLIRFIEELKGGTKKGKPNIGQEQPVDDAAEVPQREPEKERGDPERQREMEEEEDEDEDEDEDEDERQLLGEFEKELEGILLPSDRDRLRSEVKAGMERELENIIQETEKELDPDGLKKESERDRAMLALTSTLNKLIKRLEEKQSPELVKKHKKKRVVPKKPPPSPQPTGKIEIKIVRPWAEGTEEGARWLTDEDTRNLKEIFFNILVPGAEEAQKERQRQKELESNYRRVWGSPGGEGTGDLDEFDF

SEQ ID NO: 68321 - protein, 46 aa, Homo sapiens
LFFVAAAALALGAEPEGRRWRDDCRVGEQRSGARLVSQHPECGFLL

SEQ ID NO: 68322 - protein, 1341 aa, Homo sapiens
RANDALQVLGLLFSLARGSEVGNSQAVCPGTLNGLSVTGDAENQYQTLYKLYERCEVVMGNLEIVLTGHNADLSFLQWIREVTGYVLVAMNEFSTLPLPNLRVVRGTQVYDGKFAIFVMLNYNTNSSHALRQLRLTQLTEILSGGVYIEKNDKLCHMDTIDWRDIVRDRDAEIVVKDNGRSCPPCHEVCKGRCWGPGSEDCQTLTKTICAPQCNGHCFGPNPNQCCHDECAGGCSGPQDTDCFACRHFNDSGACVPRCPQPLVYNKLTFQLEPNPHTKYQYGGVCVASCPHNFVVDQTSCVRACPPDKMEVDKNGLKMCEPCGGLCPKACEGTGSGSRFQTVDSSNIDGFVNCTKILGNLDFLITGLNGDPWHKIPALDPEKLNVFRTVREITGYLNIQSWPPHMHNFSVFSNLTTIGGRSLYNRGFSLLIMKNLNVTSLGFRSLKEISAGRIYISANRQLCYHHSLNWTKVLRGPTEERLDIKHNRPRRDCVAEGKVCDPLCSSGGCWGPGPGQCLSCRNYSRGGVCVTHCNFLNGEPREFAHEAECFSCHPECQPMEGTATCNGSGSDTCAQCAHFRDGPHCVSSCPHGVLGAKGPIYKYPDVQNECRPCHENCTQGCKGPELQDCLGQTLVLIGKTHLTMALTVIAGLVVIFMMLGGTFLYWRGRRIQNKRAMRRYLERGESIEPLDPSEKANKVLARIFKETELRKLKVLGSGVFGTVHKGVWIPEGESIKIPVCIKVIEDKSGRQSFQAVTDHMLAIGSLDHAHIVRLLGLCPGSSLQLVTQYLPLGSLLDHVRQHRGALGPQLLLNWGVQIAKGMYYLEEHGMVHRNLAARNVLLKSPSQVQVADFGVADLLPPDDKQLLYSEAKTPIKWMALESIHFGKYTHQSDVWSYGVTVWELMTFGAEPYAGLRLAEVPDLLEKGERLAQPQICTIDVYMVMVKCWMIDENIRPTFKELANEFTRMARDPPRYLVIKRESGPGIAPGPEPHGLTNKKLEEVELEPELDLDLDLEAEEDNLATTTLGSALSLPVGTLNRPRGSQSLLSPSSGYMPMNQGNLGESCQESAVSGSSERCPRPVSLHPMPRGCLASESSEGHVTGSEAELQEKVSMCRSRSRSRSPRPRGDSAYHSQRHSLLTPVTPLSPPGLEEEDVNGYVMPDTHLKGTPSSREGTLSSVGLSSVLGTEEEDEDEEYEYMNRRRRHSPPHPPRPSSLEELGYEYMDVGSDLSASLGSTQSCPLHPVPIMPTAGTTPDEDYEYMNRQRDGGGPGGDYAAMGACPASEQGYEEMRAFQGPGHQAPHVHYARLKTLRSLEATDSAFDNPDYWHSRLFPKANAQRT

SEQ ID NO: 68323 - protein, 797 aa, Homo sapiens
LGLCCVLLTFGSVRADDEVDVDGTVEEDLGKSREGSRTDDEVVQREEEAIQLDGLNASQIRELREKSEKFAFQAEVNRMMKLIINSLYKNKEIFLRELISNASDALDKIRLISLTDENALSGNEELTVKIKCDKEKNLLHVTDTGVGMTREELVKNLGTIAKSGTSEFLNKMTEAQEDGQSTSELIGQFGVGFYSAFLVADKVIVTSKHNNDTQHIWESDSNEFSVIADPRGNTLGRGTTITLVLKEEASDYLELDTIKNLVKKYSQFINFPIYVWSSKTETVEEPMEEEEAAKEEKEESDDEAAVEEEEEEKKPKTKKVEKTVWDWELMNDIKPIWQRPSKEVEEDEYKAFYKSFSKESDDPMAYIHFTAEGEVTFKSILFVPTSAPRGLFDEYGSKKSDYIKLYVRRVFITDDFHDMMPKYLNFVKGVVDSDDLPLNVSRETLQQHKLLKVIRKKLVRKTLDMIKKIADDKYNDTFWKEFGTNIKLGVIEDHSNRTRLAKLLRFQSSHHPTDITSLDQYVERMKEKQDKIYFMAGSSRKEAESSPFVERLLKKGYEVIYLTEPVDEYCIQALPEFDGKRFQNVAKEGVKFDESEKTKESREAVEKEFEPLLNWMKDKALKDKIEKAVVSQRLTESPCALVASQYGWSGNMERIMKAQAYQTGKDISTNYYASQKKTFEINPRHPLIRDMLRRIKEDEDDKTVLDLAVVLFETATLRSGYLLPDTKAYGDRIERMLRLSLNIDPDAKVEEEPEEEPEETAEDTTEDTEQDEDEEMDVGTDEEEETAKESTAEKDEL

SEQ ID NO: 68324 - protein, 199 aa, Homo sapiens
LRPSLLPLHLLLLLLLSAAVCRAEAGLETESPVRTLQVETLVEPPEPCAEPAAFGDTLHIHYTGSLVDGRIIDTSLTRDPLVIELGQKQVIPGLEQSLLDMCVGEKRRAIIPSHLAYGKRGFPPSVPADAVVQYDVELIALIRANYWLKLVKGILPLVGMAMVPALLGLIGYHLYRKANRPKVSKKKLKEEKRNKSKKK

SEQ ID NO: 68325 - protein, 133 aa, Homo sapiens
ISGILAALSAMISLEIPQVNIMTKMDLLSKKAKKEIEKFLDPDMYSLLEDSTSDLRSKKFKKLTKAICGLIDDYSMVRFLPYDQSDEESMNIVLQHIDFAIQYGEDLEFKEPKEREDESSSMFDEYFQECQDE

SEQ ID NO: 68326 - protein, 38 aa, Homo sapiens
VPFTLLPLLTMAYLKGDLRRMWSEPFHSKSSSSRFLEV

SEQ ID NO: 68327 - protein, 666 aa, Homo sapiens
LVLKRCLLHLAVIGALLAVGATKVPRNQDWLGVSRQLRTKAWNRQLYPEWTEAQRLDCWRGGQVSLKVSNDGPTLIGANASFSIALNFPGSQKVLPDGQVIWVNNTIINGSQVWGGQPVYPQETDDACIFPDGGPCPSGSWSQKRSFVYVWKTWGQYWQVLGGPVSGLSIGTGRAMLGTHTMEVTVYHRRGSRSYVPLAHSSSAFTITDQVPFSVSVSQLRALDGGNKHFLRNQPLTFALQLHDPSGYLAEADLSYTWDFGDSSGTLISRALVVTHTYLEPGPVTAQVVLQAAIPLTSCGSSPVPGTTDGHRPTAEAPNTTAGQVPTTEVVGTTPGQAPTAEPSGTTSVQVPTTEVISTAPVQMPTAESTGMTPEKVPVSEVMGTTLAEMSTPEATGMTPAEVSIVVLSGTTAAQVTTTEWVETTARELPIPEPEGPDASSIMSTESITGSLGPLLDGTATLRLVKRQVPLDCVLYRYGSFSVTLDIVQGIESAEILQAVPSGEGDAFELTVSCQGGLPKEACMEISSPGCQPPAQRLCQPVLPSPACQLVLHQILKGGSGTYCLNVSLADTNSLAVVSTQLIMPVPGILLTGQEAGLGQVPLIVGILLVLMAVVLASLIYRRRLMKQDFSVPQLPHSSSHWLRLPRIFCSCPIGENSPLLSGQQV

SEQ ID NO: 68328 - protein, 420 aa, Homo sapiens
IRKMALKVLLEQEKTFFTLLVLLGYLSCKVTCESGDCRQQEFRDRSGNCVPCNQCGPGMELSKECGFGYGEDAQCVTCRLHRFKEDWGFQKCKPCLDCAVVNRFQKANCSATSDAICGDCLPGFYRKTKLVGFQDMECVPCGDPPPPYEPHCASKVNLVKIASTASSPRDTALAAVICSALATVLLALLILCVIYCKRQFMEKKPSWSLRSQDIQYNGSELSCFDRPQLHEYAHRACCQCRRDSVQTCGPVRLLPSMCCEEACSPNPATLGCGVHSAASLQARNAGPAGEMVPTFFGSLTQSICGEFSDAWPLMQNPMGGDNISFCDSYPELTGEDIHSLNPELESSTSLDSNSSQDLVGGAVPVQSHSENFTAATDLSRYNNTLVESASTQDALTMRSQLDQESGAVIHPATQTSLQEA

SEQ ID NO: 68329 - protein, 85 aa, Homo sapiens
LLGLVIVFGPTMFLEWSLFDDLATWKGCLSNFSSYLTKTADFIEQSVFYWEQVTDGFFIFNERFKNFTLVVLNNVAEFVCKYKLL

SEQ ID NO: 68330 - protein, 9 aa, Homo sapiens
LFLLWIGWW

SEQ ID NO: 68331 - protein, 38 aa, Homo sapiens
LFFFNGVWVLIPGLLLWQSWLELKKMHQKETSSVKKFQ

SEQ ID NO: 68332 - protein, 43 aa, Homo sapiens
KIFDIGSSIVMMISFRRCLAVVSALLACLTNPTKVLEATSTFK

SEQ ID NO: 68333 - protein, 20 aa, Homo sapiens
IVLFLLSLFYSTTVTLFKVK

SEQ ID NO: 68334 - protein, 179 aa, Homo sapiens
VLPLRGLRALCRVLLFLSQFCILSGGESTEIPPYVMKCPSNGLCSRLPADCIDCTTNFSCTYGKPVTFDCAVKPSVTCVDQDFKSQKNFIINMTCRFCWQLPETDYECTNSTSCMTVSCPRQRYPANCTVRDHVHCLGNRTFPKMLYCNWTGGYKWSTALALSLQAQVGLHVQLTVGLH

SEQ ID NO: 68335 - protein, 89 aa, Homo sapiens
LLLALILPLLFYLRKRNKTGKHDVQVLTAKPRNGLAGDTETFRKVEPGQAIPLTAVPGQGPPPGGQPDPELLQFCRTPNPALKNGQYWV

SEQ ID NO: 68336 - protein, 126 aa, Homo sapiens
LMIVLGLIFMKGNTIKETEAWDFLRRLGVYPTKKHLIFGDPKKLITEDFVRQRYLEYRRIPHTDPVDYEFQWGPRTNLETSKMKVLKFVAKVHNQDPKDWPAQYCEALADEENRARPQPSGPAPSS

SEQ ID NO: 68337 - protein, 51 aa, Homo sapiens
ITLIGLFFAGIHKRVVAPSIIAARCRTVLAEYNMSCDDTGKLILKPRPHVQ

SEQ ID NO: 68338 - protein, 45 aa, Homo sapiens
LPFLFWFSLASLITLFHLFLFKLIYNEYCGPGAKPLCRSKEDPSV

SEQ ID NO: 68339 - protein, 24 aa, Homo sapiens
LCALGSFLLNSLLSTFRLNSSAPS

SEQ ID NO: 68340 - protein, 23 aa, Homo sapiens
ILLLSFKAEVCFVLLLQCIFQDC

SEQ ID NO: 68341 - protein, 23 aa, Homo sapiens
ILLLSFKAEVCFVLLLQCIFQDC

SEQ ID NO: 68342 - protein, 22 aa, Homo sapiens
LLWAFSCFIFVTANIILSETKL

SEQ ID NO: 68343 - protein, 51 aa, Homo sapiens
MLFTGYFVLCCSWSFRRLKKLCRPLPWKSTVPPCIGVAKTTGDCRSKTCLD

SEQ ID NO: 68344 - protein, 29 aa, Homo sapiens
MFCRHWVQKLTGLVLPHSVWLVLLVQRSQ

SEQ ID NO: 68345 - protein, 10 aa, Homo sapiens
ILTIRILLIY

SEQ ID NO: 68346 - protein, 363 aa, Homo sapiens
LLLLTAACSGLLFALYFSAVQRYPGPAAGARDTTSFEAFFQSKASNSWTGKGQACRHLLHLAIQRHPHFRGLFNLSIPVLLWGDLFTPALWDRLSQHKAPYGWRGLSHQVIASTLSLLNGSESAKLFAPPRDTPPKCIRCAVVGNGGILNGSRQGPNIDAHDYVFRLNGAVIKGFERDVGTKTSFYGFTVNTMKNSLVSYWNLGFTSVPQGQDLQYIFIPSDIRDYVMLRSAILGVPVPEGLDKGDRPHAYFGPEASASKFKLLHPDFISYLTERFLKSKLINTHFGDLYMPSTGALMLLTALHTCDQVSAYGFITSNYWKFSDHYFERKMKPLIFYANHDLSLEAALWRDLHKAGILQLYQR

SEQ ID NO: 68347 - protein, 781 aa, Homo sapiens
IVGIKRVNAMNCYLLLRFMLGIPLLWPCLGATENSQTKKVKQPVRSHLRVKRGWVWNQFFVPEEMNTTSHHIGQLRSDLDNGNNSFQYKLLGAGAGSTFIIDERTGDIYAIQKLDREERSLYILRAQVIDIATGRAVEPESEFVIKVSDINDNEPKFLDEPYEAIVPEMSPEGTLVIQVTASDADDPSSGNNARLLYSLLQGQPYFSVEPTTGVIRISSKMDRELQDEYWVIIQAKDMIGQPGALSGTTSVLIKLSDVNDNKPIFKESLYRLTVSESAPTGTSIGTIMAYDNDIGENAEMDYSIEEDDSQTFDIITNHETQEGIVILKKKVDFEHQNHYGIRAKVKNHHVPEQLMKYHTEASTTFIKIQVEDVDEPPLFLLPYYVFEVFEETPQGSFVGVVSATDPDNRKSPIRYSITRSKVFNINDNGTITTSNSLDREISAWYNLSITATEKYNIEQISSIPLYVQVLNINDHAPEFSQYYETYVCENAGSGQVIQTISAVDRDESIEEHHFYFNLSVEDTNNSSFTIIDNQDNTAVILTNRTGFNLQEEPVFYISILIADNGIPSLTSTNTLTIHVCDCGDSGSTQTCQYQELVLSMGFKTEVIIAILICIMIIFGFIFLTLGLKQRRKQILFPEKSEDFRENIFQYDDEGGGEEDTEAFDIAELRSSTIMRERKTRKTTSAEIRSLYRQSLQVGPDSAIFRKFILEKLEEANTDPCAPPFDSLQTYAFEGTGSLAGSLSSLESAVSDQDESYDYLNELGPRFKRLACMFGSAVQSNN

SEQ ID NO: 68348 - protein, 265 aa, Homo sapiens
LFVLLGFALLGTHGASGAAGTVFTTVEDLGSKILLTCSLNDSATEVTGHRWLKGGVVLKEDALPGQKTEFKVDSDDQWGEYSCVFLPEPMGTANIQLHGPPRVKAVKSSEHINEGETAMLVCKSESVPPVTDWAWYKITDSEDKALMNGSESRFFVSSSQGRSELHIENLNMEADPGQYRCNGTSSKGSDQAIITLRVRSHLAALWPFLGIVAEVLVLVTIIFIYEKRRKPEDVLDDDDAGSAPLKSSGQHQNDKGKNVRQRNSS

SEQ ID NO: 68349 - protein, 52 aa, Homo sapiens
VVVLLHALLAMGCKLYFFQSLPPENVAPPPQITSLPSNIALSPTLPQSLAPS

SEQ ID NO: 68350 - protein, 26 aa, Homo sapiens
IAFPSSTGAITLILLLTNCEICCKWI

SEQ ID NO: 68351 - protein, 76 aa, Homo sapiens
KVVLGLSVLLTAATVAGVHVKQQWDQQRLRDGVIRDIERQIRKKENIRLLGEQIILTEQLEAEREKMLLAKGSQKS

SEQ ID NO: 68352 - protein, 63 aa, Homo sapiens
IRAAPPPLFLLLLLLLLLVSWASRGEAAPDQDEIQRLPGLAKQPSFRQYSGYLKGSGSKHLHY

SEQ ID NO: 68353 - protein, 37 aa, Homo sapiens
LAALFLICYSCWGNCFLYHCSDSPLPESAHDPGVVGT

SEQ ID NO: 68354 - protein, 639 aa, Homo sapiens
IGTKIGLFLQVAPLSVMAKSCPSVCRCDAGFIYCNDRFLTSIPTGIPEDATTLYLQNNQINNAGIPSDLKNLLKVERIYLYHNSLDEFPTNLPKYVKELHLQENNIRTITYDSLSKIPYLEELHLDDNSVSAVSIEEGAFRDSNYLRLLFLSRNHLSTIPWGLPRTIEELRLDDNRISTISSPSLQGLTSLKRLVLDGNLLNNHGLGDKVFFNLVNLTELSLVRNSLTAAPVNLPGTNLRKLYLQDNHINRVPPNAFSYLRQLYRLDMSNNNLSNLPQGIFDDLDNITQLILRNNPWYCGCKMKWVRDWLQSLPVKVNVRGLMCQAPEKVRGMAIKDLNAELFDCKDSGIVSTIQITTAIPNTVYPAQGQWPAPVTKQPDIKNPKLTKDHQTTGSPSRKTITITVKSVTSDTIHISWKLALPMTALRLSWLKLGHSPAFGSITETIVTGERSEYLVTALEPDSPYKVCMVPMETSNLYLFDETPVCIETETAPLRMYNPTTTLNREQEKEPYKNPNLPLAAIIGGAVALVTIALLALVCWYVHRNGSLFSRNCAYSKGRRRKDDYAEAGTKKDNSILEIRETSFQMLPISNEPISKEEFVIHTIFPPNGMNLYKNNHSESSSNRSYRDSGIPDSDHSHS

SEQ ID NO: 68355 - protein, 57 aa, Homo sapiens
IGISIASLCLVVALLALLCHLRKKQGAARAKMEYKCAAPSKEVVLQHVRTERTPQRL

SEQ ID NO: 68356 - protein, 73 aa, Homo sapiens
IGGLVVMPCTTILRIWTPFPALLFGPHCQFTPNTVAVGRTVPIQQKPLYPGTQNCNDDELKLCSNFLSTILAV

SEQ ID NO: 68357 - protein, 1150 aa, Homo sapiens
IGGLVVMPCTTILRIWTPFPALLFGPHCQFTPDLSSCSSTFVAETEETMFQLPVNNLGSLRKARKTVKKILSDIGLEYCKEHIEDFKQFEPNDFYLKNTTWEDVGLWDPSLTKNQDYRTKPFCCSACPFSSKFFSAYKSHFRNVHSEDFENRILLNCPYCTFNADKKTLETHIKIFHAPNASAPSSSLSTFKDKNKNDGLKPKQADSVEQAVYYCKKCTYRDPLYEIVRKHIYREHFQHVAAPYIAKAGEKSLNGAVPLGSNAREESSIHCKRCLFMPKSYEALVQHVIEDHERIGYQVTAMIGHTNVVVPRSKPLMLIAPKPQDKKSMGLPPRIGSLASGNVRSLPSQQMVNRLSIPKPNLNSTGVNMMSSVHLQQNNYGVKSVGQGYSVGQSMRLGLGGNAPVSIPQQSQSVKQLLPSGNGRSYGLGSEQRSQAPARYSLQSANASSLSSGQLKSPSLSQSQASRVLGQSSSKPAAAATGPPPGNTSSTQKWKICTICNELFPENVYSVHFEKEHKAEKVPAVANYIMKIHNFTSKCLYCNRYLPTDTLLNHMLIHGLSCPYCRSTFNDVEKMAAHMRMVHIDEEMGPKTDSTLSFDLTLQQGSHTNIHLLVTTYNLRDAPAESVAYHAQNNPPVPPKPQPKVQEKADIPVKSSPQAAVPYKKDVGKTLCPLCFSILKGPISDALAHHLRERHQVIQTVHPVEKKLTYKCIHCLGVYTSNMTASTITLHLVHCRGVGKTQNGQDKTNAPSRLNQSPSLAPVKRTYEQMEFPLLKKRKLDDDSDSPSFFEEKPEEPVVLALDPKGHEDDSYEARKSFLTKYFNKQPYPTRREIEKLAASLWLWKSDIASHFSNKRKKCVRDCEKYKPGVLLGFNMKELNKVKHEMDFDAEWLFENHDEKDSRVNASKTADKKLNLGKEDDSSSDSFENLEEESNESGSPFDPVFEVEPKISNDNPEEHVLKVIPEDASESEEKLDQKEDGSKYETIHLTEEPTKLMHNASDSEVDQDDVVEWKDGASPSESGPGSQQVSDFEDNTCEMKPGTWSDESSQSEDARSSKPAAKKKATMQGDREQLKWKNSSYGKVEGFWSKDQSQWKNASENDERLSNPQIEWQNSTIDSEDGEQFDNMTDGVAEPMHGSLAGVKLSSQQA

SEQ ID NO: 68358 - protein, 226 aa, Homo sapiens
LERRAAAPAAAAAAAMTPWLGLIVLLGSWSLGDWGAEACTCSPSHPQDAFCNSDIVIRAKVVGKKLVKEGPFGTLVYTIKQMKMYRGFTKMPHVQYIHTEASESLCGLKLEVNKYQYLLTGRVYDGKMYTGLCNFVERWDQLTLSQRKGLNYRYHLGCNCKIKSCYYLPCFVTSKNECLWTDMLSNFGYPGYQSKHYACIRQKGGYCSWYRGWAPPDKSIINATDP

SEQ ID NO: 68359 - protein, 176 aa, Homo sapiens
LLFGLLGVLVAAPDGGFDLSDALPDNENKKPTAIPKKPSAGDDFDLGDAVVDGENDDPRPPNPPKPMPNPNPNHPSSSGSFSDADLADGVSGGEGKGGSDGGGSHRKEGEEADAPGVIPGIVGAVVVAVAGAISSFIAYQKKKLCFKENAEQGEVDMESHRNANAEPAVQRTLLEK

SEQ ID NO: 68360 - protein, 71 aa, Homo sapiens
LALLLSLLVMVISPVIQLQPTFTPMRVALAGTFHYYSCERAKKAMGYQPLVTMDDAMERTVQSFRHLRRVK

SEQ ID NO: 68361 - protein, 427 aa, Homo sapiens
LRNPELHLGCALALRFLALVSWDIPGARALDNGLARTPTMGWLHWERFMCNLDCQEEPDSCISEKLFMEMAELMVSEGWKDAGYEYLCIDDCWMAPQRDSEGRLQADPQRFPHGIRQLANYVHSKGLKLGIYADVGNKTCAGFPGSFGYYDIDAQTFADWGVDLLKFDGCYCDSLENLADGYKHMSLALNRTGRSIVYSCEWPLYMWPFQKPNYTEIRQYCNHWRNFADIDDSWKSIKSILDWTSFNQERIVDVAGPGGWNDPDMLVIGNFGLSWNQQVTQMALWAIMAAPLFMSNDLRHISPQAKALLQDKDVIAINQDPLGKQGYQLRQGDNFEVWERPLSGLAWAVAMINRQEIGGPRSYTIAVASLGKGVACNPACFITQLLPVKRKLGFYEWTSRLRSHINPTGTVLLQLENTMQMSLKDLL

SEQ ID NO: 68362 - protein, 19 aa, Homo sapiens
IQKADFRQTLSAFLMGFAS

SEQ ID NO: 68363 - protein, 409 aa, Homo sapiens
VCFRLFPVPGSGLVLVCLVLGAVRSYALELNLTDSENATCLYAKWQMNFTVRYETTNKTYKTVTISDHGTVTYNGSICGDDQNGPKIAVQFGPGFSWIANFTKAASTYSIDSVSFSYNTGDNTTFPDAEDKGILTVDELLAIRIPLNDLFRCNSLSTLEKNDVVQHYWDVLVQAFVQNGTVSTNEFLCDKDKTSTVAPTIHTTVPSPTTTPTPKEKPEAGTYSVNNGNDTCLLATMGLQLNITQDKVASVININPNTTHSTGSCRSHTALLRLNSSTIKYLDFVFAVKNENRFYLKEVNISMYLVNGSVFSIANNNLSYWDAPLGSSYMCNKEQTVSVSGAFQINTFDLRVQPFNVTQGKYSTAQDCSADDDNFLVPIAVGAALAGVLILVLLAYFIGLKHHHAGYEQF

SEQ ID NO: 68364 - protein, 310 aa, Homo sapiens
LKGVMLGSIFCALITMLGHIRIGHGNRMHHHEHHHLQAPNKEDILKISEDERMELSKSFRVYCIILVKPKDVSLWAAVKETWTKHCDKAEFFSSENVKVFESINMDTNDMWLMMRKAYKYAFDKYRDQYNWFFLARPTTFAIIENLKYFLLKKDPSQPFYLGHTIKSGDLEYVGMEGGIVLSVESMKRLNSLLNIPEKCPEQGGMIWKISEDKQLAVCLKYAGVFAENAEDADGKDVFNTKSVGLSIKEAMTYHPNQVVEGCCSDMAVTFNGLTPNQMHVMMYGVYRLRAFGHIFNDALVFLPPNGSDND

SEQ ID NO: 68365 - protein, 61 aa, Homo sapiens
MWTFIVALVFTHKGYLNMEFNPSDHPRASTIFLSKSQTDVREKRKSLFINHVSEAVSLCSS

SEQ ID NO: 68366 - protein, 37 aa, Homo sapiens
MLVCCVLSFISSQLKLALLTWCTQSKNCKKTGAKPLP

SEQ ID NO: 68367 - protein, 937 aa, Homo sapiens [sequence omitted]

SEQ ID NO: 68368 - protein, 443 aa, Homo sapiens [sequence omitted]

SEQ ID NO: 68369 - protein, 41 aa, Homo sapiens [sequence omitted]

SEQ ID NO: 68370 - protein, 45 aa, Homo sapiens
MLRLVFALVTAVCCLADGALIYRKLLFNPSGPYQKKPVHEKKEVL

SEQ ID NO: 68371 - protein, 52 aa, Homo sapiens
MSFVAGGISGTVAAVLTLPFDVVKTQRQVALGAMEAVRGEGPDCRGRGQVGS

SEQ ID NO: 68372 - protein, 145 aa, Homo sapiens
MLLLAAAFLVAFVLLLYMVSPLISPKPLALPGAHVVVTGGSSGIGKCIAIECYKQGAFITLVARNEDKLLQAKKEIEMHSINDKQVVLCISVDVSQDYNQVENVIKQVRGWANWNSPMCLTFDLFLPFCYVAWNGHNFSIGLIVL

SEQ ID NO: 68373 - protein, 1493 aa, Homo sapiens
MVSVVGPMGLLVVLLVGGCAAEEPPRFIKEPKDQIGVSGGVASFVCQATGDPKPRVTWNKKGKKVNSQRFETIEFDESAGAVLRIQPLRTPRDENVYECVAQNSVGEITVHAKLTVLREDQLPSGFPNIDMGPQLKVVERTRTATMLCAASGNPDPEITWFKDFLPVDPSASNGRIKQLRSGALQIESSEETDQGKYECVATNSAGVRYSSPANLYVRVRRVAPRFSILPMSHEIMPGGNVNITCVAVGSPMPYVKWMQGAEDLTPEDDMPVGRNVLELTDVKDSANYTCVAMSSLGVIEAVAQITVKSLPKAPGTPMVTENTATSITITWDSGNPDPVSYYVIEYKSKSQDGPYQIKEDITTTRYSIGGLSPNSEYEIWVSAVNSIGQGPPSESVVTRTGEQAPASAPRNVQARMLSATTMIVQWEEPVEPNGLIRGYRVYYTMEPEHPVGNWQKHNVDDSLLTTVGSLLEDETYTVRVLAFTSVGDGPLSDPIQVKTQQGVPGQPMNLRAEARSETSITLSWSPPRQESIIKYELLFREGDHGREVGRTFDPTTSYVVEDLKPNTEYAFRLAARSPQGLGAFTPVVRQRTLQSISPKNFKVKMIMKTSVLLSWEFPDNYNSPTPYKIQYNGLTLDVDGRTTKKLITHLKPHTFYNFVLTNRGSSLGGLQQTVTAWTAFNLLNGKPSVAPKPDADGFIMVYLPDGQSPVPVQSYFIVMVPLRKSRGGQFLTPLGSPEDMDLEELIQDISRLQRRSLRHSRQLEVPRPYIAARFSVLPPTFHPGDQKQYGGFDNRGLEPGHRYVLFVLAVLQKSEPTFAASPFSDPFQLDNPDPQPIVDGEEGLIWVIGPVLAVVFIICIVIAILLYKNKPDSKRKDSEPRTKCLLNNADLAPHHPKDPVEMRRINFQTPGMLSHPPIPIADMAEHTERLKANDSLKLSQEYESIDPGQQFTWEHSNLEVNKPKNRYANVIAYDHSRVILQPIEGIMGSDYINANYVDGYRCQNAYIATQGPLPETFGDFWRMVWEQRSATIVMMTRLEEKSRIKCDQYWPNRGTETYGFIQVTLLDTIELATFCVRTFSLHKNGSSEKREVRQFQFTAWPDHGVPEYPTPFLAFLRRVKTCNPPDAGPIVVHCSAGVGRTGCFIVIDAMLERIKPEKTVDVYGHVTLMRSQRNYMVQTEDQYSFIHEALLEAVGCGNTEVPARSLYAYIQKLAQVEPGEHVTGMELEFKRLANSKAHTSRFISANLPCNKFKNRLVNIMPYESTRVCLQPIRGVEGSDYINASFIDGYRQQKAYIATQGPLAETTEDFWRMLWENNSTIVVMLTKLREMGREKCHQYWPAERSARYQYFVVDPMAEYNMPQYILREFKVTDARDGQSRTVRQFQFTDWPEQGVPKSGEGFIDFIGQVHKTKEQFGQDGPISVHCSAGVGRTGVFITLSIVLERMRYEGVVDIFQTVKMLRTQRPAMVQTEDEYQFCYQAALEYLGSFDHYAT

SEQ ID NO: 68374 - protein, 613 aa, Homo sapiens
MSGLLSQTVILALIFLPQTRPAGVFELQIHSFGPGPGPGAPRSPCSARLPCRLFFRVCLKPGLSEEAAESPCALGAALSARGPVYTEQPGAPAPDLPLPDGLLQVPFRDAWPGTFSFIIETWREELGDQIGGPAWSLLARVAGRRRLAAGGPWARDIQRAGAWELRFSYRARCEPPAVGTACTRLCRPRSAPSRCGPGLRPCAPLEDECEAPLVCRAGCSPEHGFCEQPGECRCLEGWTGPLCTVPVSTSSCLSPRGPSSATTGCLVPGPGPCDGNPCANGGSCSETPRSFECTCPRGFYGLRCEVSGVTCADGPCFNGGLCVGGADPDSAYICHCPPGFQGSNCEKRVDRCSLQPCRNGGLCLDLGHALRCRCRAGFAGPRCEHDLDDCAGRACANGGTCVEGGGAHRCSCALGFGGRDCRERADPCAARPCAHGGRCYAHFSGLVCACAPGYMGARCEFPVHPDGASALPAAPPGLRPGDPQRYLLPPALGLLVAAGVAGAALLLVHVRRRGHSQDAGSRLLAGTPEPSVHALPDALNNLRTQEGSGDGPSSSVDWNRPEDVDPQGIYVISAPSIYAREVATPLFPPLHTGRAGQRQHLLFPYPSSILSVK

SEQ ID NO: 68375 - protein, 582 aa, Homo sapiens
MSGLLSQTVILALIFLPQTRPAGVFELQIHSFGPGPGPGAPRSPCSARLPCRLFFRVCLKPGLSEEAAESPCALGAALSARGPVYTEQPGAPAPDLPLPDGLLQVPFRDAWPGTFSFIIETWREELGDQIGGPAWSLLARVAGRRRLAAGGPWARDIQRAGAWELRFSYRARCEPPAVGTACTRLCRPRSAPSRCGPGLRPCAPLEDECEAPLVCRAGCSPEHGFCEQPGECRCLEGWTGPLCTVPVSTSSCLSPRGPSSATTGCLVPGPGPCDGNPCANGGSCSETPRSFECTCPRGFYGLRCEVSGVTCADGPCFNGGLCVGGADPDSAYICHCPPGFQGSNCEKRVDRCSLQPCRNGGLCLDLGHALRCRCRAGFAGPRCEHDLDDCAGRACANGGTCVEGGGAHRCSCALGFGGRDCRERADPCAARPCAHGGRCYAHFSGLVCACAPGYMGARCEFPVHPDGASALPAAPPGLRPGDPQRYLLPPALGLLVAAGVAGAALLLVHVRRRGHSQDAGSRLLAGTPEPSVHALPDALNNLRTQEGSGDGPSSSVDWNRPEDVDPQGIYVISAPSIYAREA

SEQ ID NO: 68376 - protein, 23 aa, Homo sapiens
MGIYLILLGSHLAACGQSTLPLP

SEQ ID NO: 68377 - protein, 303 aa, Homo sapiens [sequence omitted]

SEQ ID NO: 68378 - protein, 67 aa, Homo sapiens
MVSHRKDWRRVNLRFSSCLLLSICLDDKPSADELCFWTDHGRSQLTCPSLGVSQGYVTTKTLIHPFF

SEQ ID NO: 68379 - protein, 67 aa, Homo sapiens
MVSHRKDWRRVNLRFSSCLLLSICLDDKPSADELCFWTDHGRSQLTCPSLGVSQGCTDEETETENPE

SEQ ID NO: 68380 - protein, 120 aa, Homo sapiens
MVSHRKDWRRVNLRFSSCLLLSICLDDKPSADELCFWTDHGRSQLTCPSLGVSQGSLTLSSRLECSGTISAHCKLCLPGSRHSPASVSQVAALMRKLKQKIQSKFHQATQQGLIEPGETL

SEQ ID NO: 68381 - protein, 1435 aa, Homo sapiens
MFTQLLLCGFLYVRVDGSRLRQEDFPPRIVEHPSDVIVSKGEPTTLNCKAEGRPTPTIEWYKDGERVETDKDDPRSHRMLLPSGSLFFLRIVHGRRSKPDEGSYVCVARNYLGEAVSRNASLEVALLRDDFRQNPTDVVVAAGEPAILECQPPRGHPEPTIYWKKDKVRIDDKEERISIRGGKLMISNTRKSDAGMYTCVGTNMVGERDSDPAELTVFERPTFLRRPINQVVLEEEAVEFRCQVQGDPQPTVRWKKDDADLPRGRYDIKDDYTLRIKKTMSTDEGTYMCIAENRVGKMEASATLTVRAPPQFVVRPRDQIVAQGRTVTFPCETKGNPQPAVFWQKEGSQNLLFPNQPQQPNSRCSVSPTGDLTITNIQRSDAGYYICQALTVAGSILAKAQLEVTDVLTDRPPPIILQGPANQTLAVDGTALLKCKATGDPLPVISWLKEGFTFPGRDPRATIQEQGTLQIKNLRISDTGTYTCVATSSSGETSWSAVLDVTESGATISKNYDLSDLPGPPSKPQVTDVTKNSVTLSWQPGTPGTLPASAYIIEAFSQSVSNSWQTVANHVKTTLYTVRGLRPNTIYLFMVRAINPQGLSDPSPMSDPVRTQDISPPAQGVDHRQVQKELGDVLVRLHNPVVLTPTTVQVTWTVDRQPQFIQGYRVMYRQTSGLQATSSWQNLDAKVPTERSAVLVNLKKGVTYEIKVRPYFNEFQGMDSESKTVRTTEEAPSAPPQSVTVLTVGSYNSTSISVSWDPPPPDHQNGIIQEYKIWCLGNETRFHINKTVDAAIRSVIIGGLFPGIQYRVEVAASTSAGVGVKSEPQPIIIGRRNEVVITENNNSITEQITDVVKQPAFIAGIGGACWVILMGFSIWLYWRRKKRKGLSNYAVTFQRGDGGLMSNGSRPGLLNAGDPSYPWLADSWPATSLPVNNSNSGPNEIGNFGRGDVLPPVPGQGDKTATMLSDGAIYSSIDFTTKTSYNSSSQITQATPYATTQILHSNSIHELAVDLPDPQWKSSIQQKTDLMGFGYSLPDQNKGNNGGKGGKKKKNKNSSKPQKNNGSTWANVPLPPPPVQPLPGTELEHYAVEQQENGYDSDSWCPPLPVQTYLHQGLEDELEEDDDRVPTPPVRGVASSPAISFGQQSTATLTPSPREEMQPMLQAHLDELTRAYQFDIAKQTWHIQSNNQPPQPPVPPLGYVSGALISDLETDVADDDADDEEEALEIPRPLRALDQTPGSSMDNLDSSVTGSMVNGWGSASDEDRNFSSHRSSVGSSSDGSIFASGSFAQALVAAADKAGFRLDGTSLTRTGKAFTSSQRPRPTSPFSTDSNTSAALSQSQRPRPTKKHKGGRMDQQPALPHRREGMTDEEALVPYSKPSFPSPGGHSSSGTASSKGSTGPRKTEVLRAGHQRNASDLLDIGYMGSNSQGQFTGEL

SEQ ID NO: 68382 - protein, 328 aa, Homo sapiens [sequence omitted]

SEQ ID NO: 68383 - protein, 105 aa, Homo sapiens
MNVGRFTEEIEWLKFLALACSALGVTITKTLKIVCEVLSCDHNGGSPRIPFSTFQFLYTYIAKVDGEISASHVSRMLNYMEQEVIGPDGIITVNDFTQNPRVQLE

SEQ ID NO: 68384 - protein, 274 aa, Homo sapiens
MCSWALALSLAAIALSPTVSLAPAATLPGDNVVLDQTYLWQGVRVAAGAQIHQSLLCDNAEVKERVTLKPRSVLTSQVVVGPNITLPEGSVISLHPPDAEEDEDDGEFSDDSGADQEKDKVKMKGYNPAEVGAAGKGYLWKAAGMNMEEEEELQQNLWGLKINMEEESESESEQSMDSEEPDSRGGSPQMDDIKVFQNEVLGTLQRGKEENISCDNLVLEINSLKYAYNISLKEVMQVLSHVVLEFPLQQMDSPLDSSRYCALLLPLPSFFHSC

SEQ ID NO: 68385 - protein, 1431 aa, Homo sapiens
MIYCIHALSLYLFKLGIAPQIQDLLGKVDFTEEEISNMRKELEKYGIQMPSFSKIGGILANELSVDEAALHAAVIAINEAVEKGIAEQTVVTLRNPNAVLTLVDDNLAPEYQKELWDAKKKKEENARLKNSCISEEERDAYEELLTQAEIQGNINKVNRQAAVDHINAVIPEGDPENTLLALKKPEAQLPAVYPFAAAMYQNELFNLQKQNTMNYLAHEELLIAVEMLSAVALLNQALESNDLVSVQNQLRSPAIGLNNLDKAYVERYANTLLSVKLEVLSQGQDNLSWNEIQNCIDMVNAQIQEENDRVVAVGYINEAIDEGNPLRTLETLLLPTANISDVDPAHAQHYQDVLYHAKSQKLGDSESVSKVLWLDEIQQAVDDANVDKDRAKQWVTLVVDVNQCLEGKKSSDILSVLKSSTSNANDIIPECADKYYDALVKAKELKSERVSSDGSWLKLNLHKKYDYYYNTDSKESSWVTPESCLYKESWLTGKEIEDIIEEVTVGYIRENIWSASEELLLRFQATSSGPILREEFEARKSFLHEQEENVVKIQAFWKGYKQRKEYMHRRQTFIDNTDSIVKIQSWFRMATARKSYLSRLQYFRDHNNEIVKIQSLLRANKARDDYKTLVGSENPPLTVIRKFVYLLDQSDLDFQEELEVARLREEVVTKIRANQQLEKDLNLMDIKIGLLVKNRITLEDVISHSKKLNKKKGGEMEILNNTDNQGIKSLSKERRKTLETYQQLFYLLQTNPLYLAKLIFQMPQNKSTKFMDTVIFTLYNYASNQREEYLLLKLFKTALEEEIKSKVDQVQDIVTGNPTVIKMVVSFNRGARGQNTLRQLLAPVVKEIIDDKSLIINTNPVEVYKAWVNQLETQTGEASKLPYDVTTEQALTYPEVKNKLEASIENLRRVTDKVLNSIISSLDLLPYGLRYIAKVLKNSIHEKFPDATEDELLKIVGNLLYYRYMNPAIVAPDGFDIIDMTAGGQINSDQRRNLGSVAKVLQHAASNKLFEGENEHLSSMNNYLSETYQEFRKYFKEACNVPEPEEKFNMDKYTDLVTVSKPVIYISIEEIISTHSLLLEHQDAIAPEKNDLLSELLGSLGEVPTVESFLGEGAVDPNDPNKANTLSQLSKTEISLVLTSKYDIEDGEAIDSRSLMIKTKKLIIDVIRNQPGNTLTEILETPATAQQEVDHATDMVSRAMIDSRTPEEMKHSQSMIEDAQLPLEQKKRKIQRNLRTLEQTGHVSSENKYQDILNEIAKDIRNQRIYRKLRKAELAKLQQTLNALNKKAAFYEEQINYYDTYIKTCLDNLKRKNTRRSIKLDGKGEPKGAKRAKPVKYTAAKLHEKGVLLDIDDLQTNQFKNVTFDIIATEDVGIFDVRSKFLGVEMEKVQLNIQDLLQMQYEGVAVMKMFDKVKVNVNLLIYLLNKKFYGK

SEQ ID NO: 68386 - protein, 101 aa, Homo sapiens
MKLHCCLFTLVASIIVPAAFVLEDVDFDQMVSLEANRSSYNASFPSSFELSASSHSDDDVIIAKEGTSVSIECLLTASHYEDVHWHNSKGQQLDGRSRGLR

SEQ ID NO: 68387 - protein, 225 aa, Homo sapiens
MGPEALSSLLLLLLVASGDADMKGHFDPAKCRYALGMQDRTIPDSDISASSSWSDSTAARHSRLESSDGDGAWCPAGSVFPKEEEYLQVDLQRLHLVALVGTQGRHAGGLGKEFSRSYRLRYSRDGRRWMGWKDRWGQEVISGNEDPEGVVLKDLGPPMVARLVRFYPRADRVMSVCLRVELYGCLWRGEWLSFLGICFLSRGLEGGECGEWASRIPSPAGKLSL

SEQ ID NO: 68388 - protein, 570 aa, Homo sapiens
MVFLVACALHIALDLLPRLERRGARPSGEPGCSCAQPAAEVAAPGWAQVRGRPGEPPAASSAAGDAGWPNKHTLRILQDFSSDPSSNLSSHSLEKLPPAAEPAERALRGRDPGALRPHDPAHRPLLRDPGPRRSESPPGPGGDASLLARLFEHPLYRVAVPPLTEEDVLFNVNSDTRLSPKAAENPDWPHAGAEGAEFLSPGEAAVDSYPNWLKFHIGINRYELYSRHNPAIEALLHDLSSQRITSVAMKSGGTQLKLIMTFQNYGQALFKPMKQTREQETPPDFFYFSDYERHNAEIAAFHLDRILDFRRVPPVAGRMVNMTKEIRDVTRDKKLWRTFFISPANNICFYGECSYYCSTEHALCGKPDQIEGSLAAFLPDLSLAKRKTWRNPWRRSYHKRKKAEWEVDPDYCEEVKQTPPYDSSHRILDVMDMTIFDFLMGNMDRHHYETFEKFGNETFIIHLDNGRGFGKYSHDELSILVPLQQCCRIRKSTYLRLQLLAKEEYKLSLLMAESLRGDQVAPVLYQPHLEALDRRLRVVLKAVRDCVERNGLHSVVDDDLDTEHRAASAR

SEQ ID NO: 68389 - protein, 22 aa, Homo sapiens
MILLLAYQLLHFHFQKMIRALK

SEQ ID NO: 68390 - protein, 138 aa, Homo sapiens
MGQSVLRAVFFLVLGLLGHSHGGFPNTISIGGLFMRNTVQEHSAFRFAVQLYNTNQNTTEKPFHLNYHVDHLDSSNSFSVTNACPAERDYLPWPGSIRENNWTALPCCKDHGLLHLKCSPGGARQNWAYCIWGVTGEL

SEQ ID NO: 68391 - protein, 15 aa, Homo sapiens
LSRFLRCMTVLMLLT

SEQ ID NO: 68392 - protein, 264 aa, Homo sapiens
LLPGLSLTMLSRVVLSAAATAAPSLKNAAFLGPGVLQATRTFHTGQPHLVPVPPLPEYGGKVRYGLIPEEFFQFLYPKTGVTGPYVLGTGLILYALSKEIYVISAETFTALSVLGVMVYGIKKYGPFVADFADKLNEQKLAQLEEAKQASIQHIQNAIDTEKSQQALVQKRHYLFDVQRNNIAMALEVTYRERLYRVYKEVKNRLDYHISVQNMMRRKEQEHMINWVEKHVVQSISTQQEKETIAKCIADLKLLAKKAQAQPVM

SEQ ID NO: 68393 - protein, 47 aa, Homo sapiens
LALLWALGLLGAGSPLPSWPLPNIGESSAWSGSGGGLGGRCRKVGRH

SEQ ID NO: 68394 - protein, 451 aa, Homo sapiens
ILLTSVLGFAIYWFISRDKEETLPLEDGWWGPGTRSAAREDDSIRPFKVETSDEEIHDLHQRIDKFRFTPPLEDSCFHYGFNSNYLKKVISYWRNEFDWKKQVEILNRYPHFKTKIEGLDIHFIHVKPPQLPAGHTPKPLLMVHGWPGSFYEFYKIIPLLTDPKNHGLSDEHVFEVICPSIPGYGFSEASSKKGFNSVATARIFYKLMLRLGFQEFYIQGGDWGSLICTNMAQLVPSHVKGLHLNMALVLSNFSTLTLLLGQRFGRFLGLTERDVELLYPVKEKVFYSLMRESGYMHIQCTKPDTVGSALNDSPVGLAAYILEKFSTWTNTEFRYLEDGGLERKFSLDDLLTNVMLYWTTGTIISSQRFYKENLGQGWMTQKHERMKVYVPTGFSAFPFELLHTPEKWVRFKYPKLISYSYMVRGGHFAAFEEPELLAQDIRKFLSVLERQ

SEQ ID NO: 68395 - protein, 285 aa, Homo sapiens
LRALLGLGLLVAGSRVPRIKSQTIACRSGPTWWGPQRLNSGGRWDSEVMASTVVKYLSQEEAQAVDQELFNEYQFSVDQLMELAGLSCATAIAKAYPPTSMSRSPPTVLVICGPGNNGGDGLVCARHLKLFGYEPTIYYPKRPNKPLFTALVTQCQKMDIPFLGEMPAEPMTIDELYELVVDAIFGFSFKGDVREPFHSILSVLKGLTVPIASIDIPSGWDVEKGNAGGIQPDLLISLTAPKKSATQFTGRYHYLGGRFVPPALEKKYQLNLPPYPDTECVYRLQ

SEQ ID NO: 68396 - protein, 28 aa, Homo sapiens
VVICLLVAYITENLMRPALARPGLRRHP

SEQ ID NO: 68397 - protein, 26 aa, Homo sapiens
LGPQGKLNALWAPGMVLPVLCAAFTH

SEQ ID NO: 68398 - protein, 741 aa, Homo sapiens
RSEGAMAVRALKLLTTLLAVVAAASQAEVESEAGWGMVTPDLLFAEGTAAYARGDWPGVVLSMERALRSRAALRALRLRCRTQCAADFPWELDPDWSPSPAQASGAAALRDLSFFGGLLRRAACLRRCLGPPAAHSLSEEMELEFRKRSPYNYLQVAYFKINKLEKAVAAAHTFFVGNPEHMEMQQNLDYYQTMSGVKEADFKDLETQPHMQEFRLGVRLYSEEQPQEAVPHLEAALQEYFVAYEECRALCEGPYDYDGYNYLEYNADLFQAITDHYIQVLNCKQNCVTELASHPSREKPFEDFLPSHYNYLQFAYYNIGNYTQAVECAKTYLLFFPNDEVMNQNLAYYAAMLGEEHTRSIGPRESAKEYRQRSLLEKELLFFAYDVFGIPFVDPDSWTPEEVIPKRLQEKQKSERETAVRISQEIGNLMKEIETLVEEKTKESLDVSRLTREGGPLLYEGISLTMNSKLLNGSQRVVMDGVISDHECQELQRLTNVAATSGDGYRGQTSPHTPNEKFYGVTVFKALKLGQEGKVPLQSAHLYYNVTEKVRRIMESYFRLDTPLYFSYSHLVCRTAIEEVQAERKDDSHPVHVDNCILNAETLVCVKEPPAYTFRDYSAILYLNGDFDGGNFYFTELDAKTVTAEVQPQCGRAVGFSSGTENPHGVKAVTRGQRCAIALWFTLDPRHSERDRVQADDLVKMLFSPEEMDLSQEQPLDAQQGPPEPAQESLSGSESKPKDEL

SEQ ID NO: 68399 - protein, 59 aa, Homo sapiens
LCFGPWFVPMLLMSHSLLPSWSGLWVTTWNGSSGERTPSPWRRKRASQSAGRIASWMSF

SEQ ID NO: 68400 - protein, 21 aa, Homo sapiens
KMEILQVLLTILRLQSLNVVM

SEQ ID NO: 68401 - protein, 1797 aa, Homo sapiens
TKRWLWDFTVTTLALTFLFQAREVRGAAPVDVLKALDFHNSPEGISKTTGFCTNRKNSKGSDTAYRVSKQAQLSAPTKQLFPGGTFPEDFSILFTVKPKKGIQSFLLSIYNEHGIQQIGVEVGRSPVFLFEDHTGKPAPEDYPLFRTVNIADGKWHRVAISVEKKTVTMIVDCKKKTTKPLDRSERAIVDTNGITVFGTRILDEEVFEGDIQQFLITGDPKAAYDYCEHYSPDCDSSAPKAAQAQEPQIDEYAPEDIIEYDYEYGEAEYKEAESVTEGPTVTEETIAQTEANIVDDFQEYNYGTMESYQTEAPRHVSGTNEPNPVEEIFTEEYLTGEDYDSQRKNSEDTLYENKEIDGRDSDLLVDGDLGEYDFYEYKEYEDKPTSPPNEEFGPGVPAETDITETSINGHGAYGEKGQKGEPAVVEPGMLVEGPPGPAGPAGIMGPPGLQGPTGPPGDPGDRGPPGRPGLPGADGLPGPPGTMLMLPFRYGGDGSKGPTISAQEAQAQAILQQARIALRGPPGPMGLTGRPGPVGGPGSSGAKGESGDPGPQGPRGVQGPPGPTGKPGKRGRPGADGGRGMPGEPGAKGDRGFDGLPGLPGDKGHRGERGPQGPPGPPGDDGMRGEDGEIGPRGLPGEAGPRGLLGPRGTPGAPGQPGMAGVDGPPGPKGNMGPQGEPGPPGQQGNPGPQGLPGPQGPIGPPGEKGPQGKPGLAGLPGADGPPGHPGKEGQSGEKGALGPPGPQGPIGYPGPRGVKGADGVRGLKGSKGEKGEDGFPGFKGDMGLKGDRGEVGQIGPRGEDGPEGPKGRAGPTGDPGPSGQAGEKGKLGVPGLPGYPGRQGPKGSTGFPGFPGANGEKGARGVAGKPGPRGQRGPTGPRGSRGARGPTGKPGPKGTSGGDGPPGPPGERGPQGPQGPVGFPGPKGPPGPPGKDGLPGHPGQRGETGFQGKTGPPGPGGVVGPQGPTGETGPIGERGHPGPPGPPGEQGLPGAAGKEGAKGDPGPQGISGKDGPAGLRGFPGERGLPGAQGAPGLKGGEGPQGPPGPVGSPGERGSAGTAGPIGLPGRPGPQGPPGPAGEKGAPGEKGPQGPAGRDGVQGPVGLPGPAGPAGSPGEDGDKGEIGEPGQKGSKGDKGENGPPGPPGLQGPVGAPGIAGGDGEPGPRGQQGMFGQKGDEGARGFPGPPGPIGLQGLPGPPGEKGENGDVGPMGPPGPPGPRGPQGPNGADGPQGPPGSVGSVGGVGEKGEPGEAGNPGPPGEAGVGGPKGERGEKGEAGPPGAAGPPGAKGPPGDDGPKGNPGPVGFPGDPGPPGEPGPAGQDGVGGDKGEDGDPGQPGPPGPSGEAGPPGPPGKRGPPGAAGAEGRQGEKGAKGEAGAEGPPGKTGPVGPQGPAGKPGPEGLRGIPGPVGEQGLPGAAGQDGPPGPMGPPGLPGLKGDPGSKGEKGHPGLIGLIGPPGEQGEKGDRGLPGTQGSPGAKGDGGIPGPAGPLGPPGPPGLPGPQGPKGNKGSTGPAGQKGDSGLPGPPGSPGPPGEVIQPLPILSSKKTRRHTEGMQADADDNILDYSDGMEEIFGSLNSLKQDIEHMKFPMGTQTNPARTCKDLQLSHPDFPDGEYWIDPNQGCSGDSFKVYCNFTSGGETCIYPDKKSEGVRISSWPKEKPGSWFSEFKRGKLLSYLDVEGNSINMVQMTFLKLLTASARQNFTYHCHQSAAWYDVSSGSYDKALRFLGSNDEEMSYDNNPFIKTLYDGCASRKGYEKTVIEINTPKIDQVPIVDVMINDFGDQNQKFGFEVGPVCFLG

SEQ ID NO: 68402 - protein, 209 aa, Homo sapiens
LLAALLASTLLALLVSPARGRGGRDHGDWDEASRLPPLPPREDAARVARFVTHVSDWGALATISTLEAVRGRPFADVLSLSDGPPGAGSGVPYFYLSPLQLSVSNLQENPYATLTMTLAQTNFCKKHGFDPQSPLCVHIMLSGTVTKVNETEMDIAKHSLFIRHPEMKTWPSSHNWFFAKLNITNIWVLDYFGGPKIVTPEEYYNVTVQ

SEQ ID NO: 68403 - protein, 605 aa, Homo sapiens
LPPSLPLLLLLMLGMGCWAREVLVPEGPLYRVAGTAVSISCNVTGYEGPAQQNFEWFLYRPEAPDTALGIVSTKDTQFSYAVFKSRVVAGEVQVQRLQGDAVVLKIARLQAQDAGIYECHTPSTDTRYLGSYSGKVELRVLPDVLQVSAAPPGPRGRQAPTSPPRMTVHEGQELALGCLARTSTQKHTHLAVSFGRSVPEAPVGRSTLQEVVGIRSDLAVEAGAPYAERLAAGELRLGKEGTDRYRMVVGGAQAGDAGTYHCTAAEWIQDPDGSWAQIAEKRAVLAHVDVQTLSSQLAVTVGPGERRIGPGEPLELLCNVSGALPPAGRHAAYSVGWEMAPAGAPGPGRLVAQLDTEGVGSLGPGYEGRHIAMEKVASRTYRLRLEAARPGDAGTYRCLAKAYVRGSGTRLREAASARSRPLPVHVREEGVVLEAVAWLAGGTVYRGETASLLCNISVRGGPPGLRLAASWWVERPEDGELSSVPAQLVGGVGQDGVAELGVRPGGGPVSVELVGPRSHRLRLHSLGPEDEGVYHCAPSAWVQHADYSWYQAGSARSGPVTVYPYMHALDTLFVPLLVGTGVALVTGATVLGTITCCFMKRLRKR

SEQ ID NO: 68404 - protein, 31 aa, Homo sapiens
VRWWAALMSLLEGCTMLCSSSRTTGSPTMRQ

SEQ ID NO: 68405 - protein, 58 aa, Homo sapiens
RVNLRFSSCLLLSICLDDKPSADELCFWTDHGRSQLTCPSLGVSQGCTDEETETENPE

SEQ ID NO: 68406 - protein, 8 aa, Homo sapiens
LAYWLWLL

SEQ ID NO: 68407 - protein, 571 aa, Homo sapiens
RRGRVAGGAAGPAMELRARGWWLLCAAAALVACARGDPASKSRSCGEVRQIYGAKGFSLSDVPQAEISGEHLRICPQGYTCCTSEMEENLANRSHAELETALRDSSRVLQAMLATQLRSFDDHFQHLLNDSERTLQATFPGAFGELYTQNARAFRDLYSELRLYYRGANLHLEETLAEFWARLLERLFKQLHPQLLLPDDYLDCLGKQAEALRPFGEAPRELRLRATRAFVAARSFVQGLGVASDVVRKVAQVPLGPECSRAVMKLVYCAHCLGVPGARPCPDYCRNVLKGCLANQADLDAEWRNLLDSMVLITDKFWGTSGVESVIGSVHTWLAEAINALQDNRDTLTAKVIQGCGNPKVNPQGPGPEEKRRRGKLAPRERPPSGTLEKLVSEAKAQLRDVQDFWISLPGTLCSEKMALSTASDDRCWNGMARGRYLPEVMGDGLANQINNPEVEVDITKPDMTIRQQIMQLKIMTNRLRSAYNGNDVDFQDASDDGSGSGSGDGCLDDLCSRKVSRKSSSSRTPLTHALPGLSEQEGQKTSAASCPQPPTFLLPLLLFLALTVARPRWR

SEQ ID NO: 68408 - protein, 787 aa, Homo sapiens
LLLVLLLLPPLAASSRPRAWGAAAPSAPHWNETAEKNLGVLADEDNTLQQNSSSNISYSNAMQKEITLPSRLIYYINQDSESPYHVLDTKARHQQKHNKAVHLAQASFQIEAFGSKFILDLILNNGLLSSDYVEIHYENGKPQYSKGGEHCYYHGSIRGVKDSKVALSTCNGLHGMFEDDTFVYMIEPLELVHDEKSTGRPHIIQKTLAGQYSKQMKNLTMERGDQWPFLSELQWLKRRKRAVNPSRGIFEEMKYLELMIVNDHKTYKKHRSSHAHTNNFAKSVVNLVDSIYKEQLNTRVVLVAVETWTEKDQIDITTNPVQMLHEFSKYRQRIKQHADAVHLISRVTFHYKRSSLSYFGGVCSRTRGVGVNEYGLPMAVAQVLSQSLAQNLGIQWEPSSRKPKCDCTESWGGCIMEETGVSHSRKFSKCSILEYRDFLQRGGGACLFNRPTKLFEPTECGNGYVEAGEECDCGFHVECYGLCCKKCSLSNGAHCSDGPCCNNTSCLFQPRGYECRDAVNECDITEYCTGDSGQCPPNLHKQDGYACNQNQGRCYNGECKTRDNQCQYIWGTKAAGSDKFCYEKLNTEGTEKGNCGKDGDRWIQCSKHDVFCGFLLCTNLTRAPRIGQLQGEIIPTSFYHQGRVIDCSGAHVVLDDDTDVGYVEDGTPCGPSMMCLDRKCLQIQALNMSSCPLDSKGKVCSGHGVCSNEATCICDFTWAGTDCSIRDPVRNLHPPKDEGPKGPSATNLIIGSIAGAILVAAIVLGGTGWGFKNVKKRRFDPTQQGPI

SEQ ID NO: 68409 - protein, 1474 aa, Homo sapiens
RGPGRRCLLALVLFCAWGTLAVVAQKPGAGCPSRCLCFRTTVRCMHLLLEAVPAVAPQTSILDLRFNRIREIQPGAFRRLRNLNTLLLNNNQIKRIPSGAFEDLENLKYLYLYKNEIQSIDRQAFKGLASLEQLYLHFNQIETLDPDSFQHLPKLERLFLHNNRITHLVPGTFNHLESMKRLRLDSNTLHCDCEILWLADLLKTYAESGNAQAAAICEYPRRIQGRSVATITPEELNCERPRITSEPQDADVTSGNTVYFTCRAEGNPKPEIIWLRNNNELSMKTDSRLNLLDDGTLMIQNTQETDQGIYQCMAKNVAGEVKTQEVTLRYFGSPARPTFVIQPQNTEVLVGESVTLECSATGHPPPRISWTRGDRTPLPVDPRVNITPSGGLYIQNVVQGDSGEYACSATNNIDSVHATAFIIVQALPQFTVTPQDRVVIEGQTVDFQCEAKGNPPPVIAWTKGGSQLSVDRRHLVLSSGTLRISGVALHDQGQYECQAVNIIGSQKVVAHLTVQPRVTPVFASIPSDTTVEVGANVQLPCSSQGEPEPAITWNKDGVQVTESGKFHISPEGFLTINDVGPADAGRYECVARNTIGSASVSMVLSVNVPDVSRNGDPFVATSIVEAIATVDRAINSTRTHLFDSRPRSPNDLLALFRYPRDPYTVEQARAGEIFERTLQLIQEHVQHGLMVDLNGTSYHYNDLVSPQYLNLIANLSGCTAHRRVNNCSDMCFHQKYRTHDGTCNNLQHPMWGASLTAFERLLKSVYENGFNTPRGINPHRLYNGHALPMPRLVSTTLIGTETVTPDEQFTHMLMQWGQFLDHDLDSTVVALSQARFSDGQHCSNVCSNDPPCFSVMIPPNDSRARSGARCMFFVRSSPVCGSGMTSLLMNSVYPREQINQLTSYIDASNVYGSTEHEARSIRDLASHRGLLRQGIVQRSGKPLLPFATGPPTECMRDENESPIPCFLAGDHRANEQLGLTSMHTLWFREHNRIATELLKLNPHWDGDTIYYETRKIVGAEIQHITYQHWLPKILGEVGMRTLGEYHGYDPGINAGIFNAFATAAFRFGHTLVNPLLYRLDENFQPIAQDHLPLHKAFFSPFRIVNEGGIDPLLRGLFGVAGKMRVPSQLLNTELTERLFSMAHTVALDLAAINIQRGRDHGIPPYHDYRVYCNLSAAHTFEDLKNEIKNPEIREKLKRLYGSTLNIDLFPALVVEDLVPGSRLGPTLMCLLSTQFKRLRDGDRLWYENPGVFSPAQLTQIKQTSLARILCDNADNITRVQSDVFRVAEFPHGYGSCDEIPRVDLRVWQDCCEDCRTRGQFNAFSYHFRGRRSLEFSYQEDKPTKKTRPRKIPSVGRQGEHLSNSTSAFSTRSDASGTNDFREFVLEMQKTITDLRTQIKKLESRLSTTECVDAGGESHANNTKWKKDACTICECKDGQVTCFVEACPPATCAVPVNIPGACCPVCLQKRAEEKP

SEQ ID NO: 68410 - protein, 50 aa, Homo sapiens
ITTISSFVGAWLGALPIPLDWERPWQMTVERKRSTYRSLHVPCRGLGTVK

SEQ ID NO: 68411 - protein, 378 aa, Homo sapiens
VFAVCLLACLLGVALRKFKRRNQERLNPRDVEYGTIEGLITTNVGDSTLADLLDHSCTSGSGSGLPFLVQRTVARQITLLECVGKGRYGEVWRGSWQGENVAVKIFSSRDEKSWFRETELYNTVMLRHENILGFIASDMTSRHSSTQLWLITHYHEMGSLYDYLQLTTLDTVSCLRIVLSIASGLAHLHIEIFGTQGKPAIAHRDLKSKNILVKKNGQCCIADLGLAVMHSQSTNQLDVGNNPRVGTKRYMAPEVLDETIQVDCFDSYKRVDIWAFGLVLWEVARRMVSNGIVEDYKPPFYDVVPNDPSFEDMRKVVCVDQQRPNIPNRWFSDPTLTSLAKLMKECWYQNPSARLTALRIKKTLTKIDNSLDKLKTDC

SEQ ID NO: 68412 - protein, 414 aa, Homo sapiens
KGLVPAMLWGLSLFLNLPGPIWLQPSPPPQSSPPPQPHPCHTCRGLVDSFNKGLERTIRDNFGGGNTAWEEENLSKYKDSETRLVEVLEGVCSKSDFECHRLLELSEELVESWWFHKQQEAPDLFQWLCSDSLKLCCPAGTFGPSCLPCPGGTERPCGGYGQCEGEGTRGGSGHCDCQAGYGGEACGQCGLGYFEAERNASHLVCSACFGPCARCSGPEESNCLQCKKGWALHHLKCVDIDECGTEGANCGADQFCVNTEGSYECRDCAKACLGCMGAGPGRCKKCSPGYQQVGSKCLDVDECETEVCPGENKQCENTEGGYRCICAEGYKQMEGICVKEQIPESAGFFSEMTEDELVVLQQMFFGIIICALATLAAKGDLVFTAIFIGAVAAMTGYWLSERSDRVLEGFIKGR

SEQ ID NO: 68413 - protein, 307 aa, Homo sapiens
LGLIGGLTLLLLLTLLAFAGYSGLLAGVEVSAGSPPIRNVTVAYKFHMGLYGETGRLFTESCSISPKLRSIAVYYDNPHMVPPDKCRCAVGSILSEGEESPSPELIDLYQKFGFKVFSFPAPSHVVTATFPYTTILSIWLATRRVHPALDTYIKERKLCAYPRLEIYQEDQIHFMCPLARQGDFYVPEMKETEWKWRGLVEAIDTQVDGTGADTMSDTSSVSLEVSPGSRETSAATLSPGASSRGWDDGDTRSEHSYSESGASGSSFEELDLEGEGPLGESRLDPGTEPLGTTKWLWEPTAPEKGKE

SEQ ID NO: 68414 - protein, 887 aa, Homo sapiens
LLLPLSGRTFLLLLSVVMAQSHWPSEPSEAVRDWENQLEASMHSVLSDLHEAVPTVVGIPDGTAVVGRSFRVTIPTDLIASSGDIIKVSAAGKEALPSWLHWDSQSHTLEGLPLDTDKGVHYISVSATRLGANGSHIPQTSSVFSIEVYPEDHSELQSVRTASPDPGEVVSSACAADEPVTVLTVILDADLTKMTPKQRIDLLHRMRSFSEVELHNMKLVPVVNNRLFDMSAFMAGPGNAKKVVENGALLSWKLGCSLNQNSVPDIHGVEAPAREGAMSAQLGYPVVGWHIANKKPPLPKRVRRQIHATPTPVTAIGPPTTAIQEPPSRIVPTPTSPAIAPPTETMAPPVRDPVPGKPTVTIRTRGAIIQTPTLGPIQPTRVSEAGTTVPGQIRPTMTIPGYVEPTAVATPPTTTTKKPRVSTPKPATPSTDSTTTTTRRPTKKPRTPRPVPRVTTKVSITRLETASPPTRIRTTTSGVPRGGEPNQRPELKNHIDRVDAWVGTYFEVKIPSDTFYDHEDTTTDKLKLTLKLREQQLVGEKSWVQFNSNSQLMYGLPDSSHVGKHEYFMHATDKGGLSAVDAFEIHVHRRPQGDRAPARFKAKFVGDPALVLNDIHKKIALVKKLAFAFGDRNCSTITLQNITRGSIVVEWTNNTLPLEPCPKEQIAGLSRRIAEDDGKPRPAFSNALEPDFKATSITVTGSGSCRHLQFIPVVPPRRVPSEAPPTEVPDRDPEKSSEDDVYLHTVIPAVVVAAILLIAGIIAMICYRKKRKGKLTLEDQATFIKKGVPIIFADELDDSKPPPSSSMPLILQEEKAPLPPPEYPNQSVPETTPLNQDTMGEYTPLRDEDPNAPPYQPPPPFTAPMEGKGSRPKNMTPYRSPPPYVPP

SEQ ID NO: 68415 - protein, 1883 aa, Homo sapiens
LLLLLLLLPGMWAEAGLPRAGGGSQPPFRTFSASDWGLTHLVVHEQTGEVYVGAVNRIYKLSGNLTLLRAHVTGPVEDNEKCYPPPSVQSCPHGLGSTDNVNKLLLLDYAANRLLACGSASQGICQFLRLDDLFKLGEPHHRKEHYLSSVQEAGSMAGVLIAGPPGQGQAKLFVGTPIDGKSEYFPTLSSRRLMANEEDADMFGFVYQDEFVSSQLKIPSDTLSKFPAFDIYYVYSFRSEQFVYYLTLQLDTQLTSPDAAGEHFFTSKIVRLCVDDPKFYSYVEFPIGCEQAGVEYRLVQDAYLSRPGRALAHQLGLAEDEDVLFTVFAQGQKNRVKPPKESALCLFTLRAIKEKIKERIQSCYRGEGKLSLPWLLNKELGCINSPLQIDDDFCGQDFNQPLGGTVTIEGTPLFVDKDDGLTAVAAYDYRGRTVVFAGTRSGRIRKILVDLSNPGGRPALAYESVVAQEGSPILRDLVLSPNHQYLYAMTEKQVTRVPVESCVQYTSCELCLGSRDPHCGWCVLHSICSRRDACERADEPQRFAADLLQCVQLTVQPRNVSVTMSQVPLVLQAWNVPDLSAGVNCSFEDFTESESVLEDGRIHCRSPSAREVAPITRGQGDQRVVKLYLKSKETGKKFASVDFVFYNCSVHQSCLSCVNGSFPCHWCKYRHVCTHNVADCAFLEGRVNVSEDCPQILPSTQIYVPVGVVKPITLAARNLPQPQSGQRGYECLFHIPGSPARVTALRFNSSSLQCQNSSYSYEGNDVSDLPVNLSVVWNGNFVIDNPQNIQAHLYKCPALRESCGLCLKADPRFECGWCVAERRCSLRHHCAADTPASWMHARHGSSRCTDPKILKLSPETGPRQGGTRLTITGENLGLRFEDVRLGVRVGKVLCSPVESEYISAEQIVCEIGDASSVRAHDALVEVCVRDCSPHYRALSPKRFTFVTPTFYRVSPSRGPLSGGTWIGIEGSHLNAGSDVAVSVGGRPCSFSWRNSREIRCLTPPGQSPGSAPIIININRAQLTNPEVKYNYTEDPTILRIDPEWSINSGGTLLTVTGTNLATVREPRIRAKYGGIERENGCLVYNDTTMVCRAPSVANPVRSPPELGERPDELGFVMDNVRSLLVLNSTSFLYYPDPVLEPLSPTGLLELKPSSPLILKGRNLLPPAPGNSRLNYTVLIGSTPCTLTVSETQLLCEAPNLTGQHKVTVRAGGFEFSPGTLQVYSDSLLTLPAIVGIGGGGGLLLLVIVAVLIAYKRKSRDADRTLKRLQLQMDNLESRVALECKEAFAELQTDIHELTNDLDGAGIPFLDYRTYAMRVLFPGIEDHPVLKEMEVQANVEKSLTLFGQLLTKKHFLLTFIRTLEAQRSFSMRDRGNVASLIMTALQGEMEYATGVLKQLLSDLIEKNLESKNHPKLLLRRTESVAEKMLTNWFTFLLYKFLKECAGEPLFMLYCAIKQQMEKGPIDAITGEARYSLSEDKLIRQQIDYKTLTLNCVNPENENAPEVPVKGLDCDTVTQAKEKLLDAAYKGVPYSQRPKAADMDLEWRQGRMARIILQDEDVTTKIDNDWKRLNTLAHYQVTDGSSVALVPKQTSAYNISNSSTFTKSLSRYESMLRTASSPDSLRSRTPMITPDLESGTKLWHLVKNHDHLDQREGDRGSKMVSEIYLTRLLATKGTLQKFVDDLFETIFSTAHRGSALPLAIKYMFDFLDEQADKHQIHDADVRHTWKSNCLPLRFWVNVIKNPQFVFDIHKNSITDACLSVVAQTFMDSCSTSEHKLGKDSPSNKLLYAKDIPNYKSWVERYYADIAKMPAISDQDMSAYLAEQSRLHLSQFNSMSALHEIYSYITKYKDEILAALEKDEQARRQRLRSKLEQVVDTMALSS

SEQ ID NO: 68416 - protein, 392 aa, Homo sapiens
LVFLLFAVICVWKEKKKGSYYDSFKLQTKEFQVLKSLGKLAMGSDSQSVSSSSTQDPHRGRQTLGSLRGLAKAKPEASFQVWNKDSSSKNLIPRLQKIWKNYLSMNKYKVSYKGPGPGIKFSAEALRCHLRDHVNVSMVEVTDFPFNTSEWEGYLPKESIRTKAGPWGRCAVVSSAGSLKSSQLGREIDDHDAVLRFNGAPTANFQQDVGTKTTIRLMNSQLVTTEKRFLKDSLYNEGILIVWDPSVYHSDIPKWYQNPDYNFFNNYKTYRKLHPNQPFYILKPQMPWELWDILQEISPEEIQPNPPSSGMLGIIIMMTLCDQVDIYEFLPSKRKTDVCYYYQKFFDSACTMGAYHPLLYEKNLVKHLNQGTDEDIYLLGKATLPGFRTIHC

SEQ ID NO: 68417 - protein, 52 aa, Homo sapiens
IWLVPVFLLPAKLGFRPSADSVPHVLGALDIPGSGAYEALWPKVPEVLLVPI

SEQ ID NO: 68418 - protein, 336 aa, Homo sapiens
RRVQPDRKQLPLVLLRLLCLLPTGLPVRSVDFNRGTDNITVRQGDTAILRCVVEDKNSKVAWLNRSGIIFAGHDKWSLDPRVELEKRHSLEYSLRIQKVDVYDEGSYTCSVQTQHEPKTSQVYLIVQVPPKISNISSDVTVNEGSNVTLVCMANGRPEPVITWRHLTPTGREFEGEEEYLEILGITREQSGKYECKAANEVSSADVKQVKVTVNYPPTITESKSNEATTGRQASLKCEASAVPAPDFEWYRDDTRINSANGLEIKSTEGQSSLTVTNVTEEHYGNYTCVAANKLGVTNASLVLFRPGSVRGINGSISLAVPLWLLAASLLCLLSKC

SEQ ID NO: 68419 - protein, 38 aa, Homo sapiens
VWIFCRTRLILSIVCLMITQLAGFSGPNFQDGCILRSE

SEQ ID NO: 68420 - protein, 41 aa, Homo sapiens
LFSILLALGGIEFILCLIQVINGVLGGICGFCCSHQQQYDC

SEQ ID NO: 68421 - protein, 977 aa, Homo sapiens
IAATAMRGARGAWDFLCVLLLLLRVQTGSSQPSVSPGEPSPPSIHPGKSDLIVRVGDEIRLLCTDPGFVKWTFEILDETNENKQNEWITEKAEATNTGKYTCTNKHGLSNSIYVFVRDPAKLFLVDRSLYGKEDNDTLVRCPLTDPEVTNYSLKGCQGKPLPKDLRFIPDPKAGIMIKSVKRAYHRLCLHCSVDQEGKSVLSEKFILKVRPAFKAVPVVSVSKASYLLREGEEFTVTCTIKDVSSSVYSTWKRENSQTKLQEKYNSWHHGDFNYERQATLTISSARVNDSGVFMCYANNTFGSANVTTTLEVVDKGFINIFPMINTTVFVNDGENVDLIVEYEAFPKPEHQQWIYMNRTFTDKWEDYPKSENESNIRYVSELHLTRLKGTEGGTYTFLVSNSDVNAAIAFNVYVNTKPEILTYDRLVNGMLQCVAAGFPEPTIDWYFCPGTEQRCSASVLPVDVQTLNSSGPPFGKLVVQSSIDSSAFKHNGTVECKAYNDVGKTSAYFNFAFKEQIHPHTLFTPLLIGFVIVAGMMCIIVMILTYKYLQKPMYEVQWKVVEEINGNNYVYIDPTQLPYDHKWEFPRNRLSFGKTLGAGAFGKVVEATAYGLIKSDAAMTVAVKMLKPSAHLTEREALMSELKVLSYLGNHMNIVNLLGACTIGGPTLVITEYCCYGDLLNFLRRKRDSFICSKQEDHAEAALYKNLLHSKESSCSDSTNEYMDMKPGVSYVVPTKADKRRSVRIGSYIERDVTPAIMEDDELALDLEDLLSFSYQVAKGMAFLASKNCIHRDLAARNILLTHGRITKICDFGLARDIKNDSNYVVKGNARLPVKWMAPESIFNCVYTFESDVWSYGIFLWELFSLGSSPYPGMPVDSKFYKMIKEGFRMLSPEHAPAEMYDIMKTCWDADPLKRPTFKQIVQLIEKQISESTNHIYSNLANCSPNRQKPVVDHSVRINSVGSTASSSQPLLVHDDV

SEQ ID NO: 68422 - protein, 15 aa, Homo sapiens
KRWTLIVGGLLICDL

SEQ ID NO: 68423 - protein, 294 aa, Homo sapiens
ILLLLPLLIVCSLESFVKLFIPKRRKSVTGEIVLITGAGHGIGRLTAYEFAKLKSKLVLWDINKHGLEETAAKCKGLGAKVHTFVVDCSNREDIYSSAKKVKAEIGDVSILVNNAGVVYTSDLFATQDPQIEKTFEVNVLAHFWTTKAFLPAMTKNNHGHIVTVASAAGHVSVPFLLAYCSSKFAAVGFHKTLTDELAALQITGVKTTCLCPNFVNTGFIKNPSTSLGPTLEPEEVVNRLMHGILTEQKMIFIPSSIAFLTTLERILPERFLAVLKRKISVKFDAVIGYKMKAQ

SEQ ID NO: 68424 - protein, 925 aa, Homo sapiens
LVSTGRVVGVLLLLGALNKASTVIHYEIPEEREKGFAVGNVVANLGLDLGSLSARRFRVVSGASRRFFEVNRETGEMFVNDRLDREELCGTLPSCTVTLELVVENPLELFSVEVVIQDINDNNPAFPTQEMKLEISEAVAPGTRFPLESAHDPDVGSNSLQTYELSRNEYFALRVQTREDSTKYAELVLERALDREREPSLQLVLTALDGGTPALSASLPIHIKVLDANDNAPVFNQSLYRARVLEDAPSGTRVVQVLATDLDEGPNGEIIYSFGSHNRAGVRQLFALDLVTGMLTIKGRLDFEDTKLHEIYIQAKDKGANPEGAHCKVLVEVVDVNDNAPEITVTSVYSPVPEDAPLGTVIALLSVTDLDAGENGLVTCEVPPGLPFSLTSSLKNYFTLKTSADLDRETVPEYNLSITARDAGTPSLSALTIVRVQVSDINDNPPQSSQSSYDVYIEENNLPGAPILNLSVWDPDAPQNARLSFFLLEQGAETGLVGRYFTINRDNGIVSSLVPLDYEDRREFELTAHISDGGTPVLATNISVNIFVTDRNDNAPQVLYPRPGGSSVEMLPRGTSAGHLVSRVVGWDADAGHNAWLSYSLLGSPNQSLFAIGLHTGQISTARPVQDTDSPRQTLTVLIKDNGEPSLSTTATLTVSVTEDSPEARAEFPSGSAPREQKKNLTFYLLLSLILVSVGFVVTVFGVIIFKVYKWKQSRDLYRAPVSSLYRTPGPSLHADAVRGGLMSPHLYHQVYLTTDSRRSDPLLKKPGAASPLASRQNTLRSCDPVFYRQVLGAESAPPGQQAPPNTDWRFSQAQRPGTSGSQNGDDTGTWPNNQFDTEMLQAMILASASEAADGSSTLGGGAGTMGLSARYGPQFTLQHVPDYRQNVYIPGSNATLTNAAGKRDGKAPAGGNGNKKKSGKKEKK

SEQ ID NO: 68425 - protein, 23 aa, Homo sapiens
LLPYPFMWAFLEFLIINTTGAMC

SEQ ID NO: 68426 - protein, 388 aa, Homo sapiens
ISALIFVFVYNTELWENKRFLRAALSNASLLAEACHQIFEGKVFYPTENALKTTLDEATCYEYMVRSHYVTETLSEEEAGFPLAYTVTIHKDFGTFERLFRAIYMPQNVYCVHLDQKATDAFKGAVKQLLSCFPNAFLASKKESVVYGGISRLQADLNCLEDLVASEVPWKYVINTCGQDFPLKTNREIVQYLKGFKGKNITPGVLPPDHAVGRTKYVHQELLNHKNSYVIKTTKLKTPPPHDMVIYFGTAYVALTRDFANFVLQDQLALDLLSWSKDTYSPDEHFWVTLNRIPGVPGSMPNASWTGNLRAIKWSDMEDRHGGCHGHYVHGICIYGNGDLKWLVNSPSLFANKFELNTYPLTVECLELRHRERTLNQSETAIQPSWYF

SEQ ID NO: 68427 - protein, 78 aa, Homo sapiens
KVWGLAAACFLLQHHGMPAQFTLPPAPRDETSPADAVCPGLGRDLCGSSRCCLRPPSQPDWKEPSGAALRARPAPRGR

SEQ ID NO: 68428 - protein, 1439 aa, Homo sapiens
LTAAHLLCVCTAALAVAPGPRFLVTAPGIIRPGGNVTIGVELLEHCPSQVTVKAELLKTASNLTVSVLEAEGVFEKGSFKTLTLPSLPLNSADEIYELRVTGRTQDEILFSNSTRLSFETKRISVFIQTDKALYKPKQEVKFRIVTLFSDFKPYKTSLNILIKDPKSNLIQQWLSQQSDLGVISKTFQLSSHPILGDWSIQVQVNDQTYYQSFQVSEYVLPKFEVTLQTPLYCSMNSKHLNGTITAKYTYGKPVKGDVTLTFLPLSFWGKKKNITKTFKINGSANFSFNDEEMKNVMDSSNGLSEYLDLSSPGPVEILTTVTESVTGISRNVSTNVFFKQHDYIIEFFDYTTVLKPSLNFTATVKVTRADGNQLTLEERRNNVVITVTQRNYTEYWSGSNSGNQKMEAVQKINYTVPQSGTFKIEFPILEDSSELQLKAYFLGSKSSMAVHSLFKSPSKTYIQLKTRDENIKVGSPFELVVSGNKRLKELSYMVVSRGQLVAVGKQNSTMFSLTPENSWTPKACVIVYYIEDDGEIISDVLKIPVQLVFKNKIKLYWSKVKAEPSEKVSLRISVTQPDSIVGIVAVDKSVNLMNASNDITMENVVHELELYNTGYYLGMFMNSFAVFQECGLWVLTDANLTKDYIDGVYDNAEYAERFMEENEGHIVDIHDFSLGSSPHVRKHFPETWIWLDTNMGYRIYQEFEVTVPDSITSWVATGFVISEDLGLGLTTTPVELQAFQPFFIFLNLPYSVIRGEEFALEITIFNYLKDATEVKVIIEKSDKFDILMTSNEINATGHQQTLLVPSEDGATVLFPIRPTHLGEIPITVTALSPTASDAVTQMILVKAEGIEKSYSQSILLDLTDNRLQSTLKTLSFSFPPNTVTGSERVQITAIGDVLGPSINGLASLIRMPYGCGEQNMINFAPNIYILDYLTKKKQLTDNLKEKALSFMRQGYQRELLYQREDGSFSAFGNYDPSGSTWLSAFVLRCFLEADPYIDIDQNVLHRTYTWLKGHQKSNGEFWDPGRVIHSELQGGNKSPVTLTAYIVTSLLGYRKYQPNIDVQESIHFLESEFSRGISDNYTLALITYALSSVGSPKAKEALNMLTWRAEQEGGMQFWVSSESKLSDSWQPRSLDIEVAAYALLSHFLQFQTSEGIPIMRWLSRQRNSLGGFASTQDTTVALKALSEFAALMNTERTNIQVTVTGPSSPSPVKFLIDTHNRLLLQTAELAVVQPTAVNISANGFGFAICQLNVVYNVKASGSSRRRRSIQNQEAFDLDVAVKENKDDLNHVDLNVCTSFSGPGRSGMALMEVNLLSGFMVPSEAISLSETVKKVEYDHGKLNLYLDSVNETQFCVNIPAVRNFKVSNTQDASVSIVDYYEPRRQAVRSYNSEVKLSSCDLCSDVQGCRPCEDGASGSHHHSSVIFIFCFKLLYFMELWL

SEQ ID NO: 68429 - protein, 185 aa, Homo sapiens
RAAPWTTALLLLLASQVLSPGSCADEEEVPEEWVLLHVVQGQIGAGNYSYLRLNHEGKIVLRMRSLKGDADLYVSASSLHPSFDDYELQSATCGPDAVSIPAHFRRPVGIGVYGHPSHLESEFEMKVYYDGTVEQHPFGEAAYPADGADAGQKHAGAPEDASQEEESVLWTILISILKLVLEILF

SEQ ID NO: 68430 - protein, 427 aa, Homo sapiens
VKVVGLYGFMLSISPRLTLLSLLHMPFTIAAEKVYNTRHQEVLREIQDAVARAGQVVREAVGGLQTVRSFGAEEHEVCRYKEALEQCRQLYWRRDLERALYLLVRRVLHLGVQMLMLSCGLQQMQDGELTQGSLLSFMIYQESVGSYVQTLVYIYGDMLSNVGAAEKVFSYMDRQPNLPSPGTLAPTTLQGVVKFQDVSFAYPNRPDRPVLKGLTFTLRPGEVTALVGPNGSGKSTVAALLQNLYQPTGGQVLLDEKPISQYEHCYLHSQVVSVGQEPVLFSGSVRNNIAYGLQSCEDDKVMAAAQAAHADDFIQEMEHGIYTDVGEKGSQLAAGQKQRLAIARALVRDPRVLILDEATSALDVQCEQALQDWNSRGDRTVLVIAHRLQTVQRAHQILVLQEGKLQKLAQLEGQDLYSRLVQQRLMD

SEQ ID NO: 68431 - protein, 48 aa, Homo sapiens
ISVFLCCPVMAGTRIVWSSDQEDSQERTESQCAVCHGPWMNVCGTGLN

SEQ ID NO: 68432 - protein, 16 aa, Homo sapiens
LLLLLLVAPLQMYCCP

SEQ ID NO: 68433 - protein, 207 aa, Homo sapiens
LWNAVLTLFVTSLIGALIPEPEVKIEVLQKPFICHRKTKGGDLMLVHYEGYLEKDGSLFHSTHKHNNGQPIWFTLGILEALKGWDQGLKGMCVGEKRKLIIPPALGYGKEGKGKIPPESTLIFNIDLLEIRNGPRSHESFQEMDLNDDWKLSKDEVKAYLKKEFEKHGAVVNESHHDALVEDIFDKEDEDKDGFISAREFTYKHDEL

SEQ ID NO: 68434 - protein, 19 aa, Homo sapiens
KTVYLLLLMIVRTTSFLLL

SEQ ID NO: 68435 - protein, 334 aa, Homo sapiens
VPPAVGLLLIMALMNTLLYLCLDHFFIAPRQSTVDPTHCPYGHFRIGQMKNCSPWLSCEELRTEVRQLKRVGEGAVKRVFLSEWKEHKVALSQLTSLEMKDDFLHGLQMLKSLQGTHVVTLLGYCEDDNTMLTEYHPLGSLSNLEETLNLSKYQNVNTWQHRLELAMDYVSIINYLHHSPVGTRVMCDSNDLPKTLSQYLLTSNFSILANDLDALPLVNHSSGMLVKCGHRELHGDFVAPEQLWPYGEDVPFHDDLMPSYDEKIDIWKIPDISSFLLGHIEGSDMVRFHLFDIHKACKSQTPSERPTAQDVLETYQKVLDTLRDAMMSQAREML

SEQ ID NO: 68436 - protein, 67 aa, Homo sapiens
VVGVAARRGSLLLCLPLQLRPLPLASGVGAEKTCRSHGGRSGPLCQEDGQDGAEEERGWSIGFAKGA

SEQ ID NO: 68437 - protein, 878 aa, Homo sapiens
IQAGTMGTSALWALWLLLALCWAPRESGATGTGRKAKCEPSQFQCTNGRCITLLWKCDGDEDCVDGSDEKNCVKKTCAESDFVCNNGQCVPSRWKCDGDPDCEDGSDESPEQCHMRTCRIHEISCGAHSTQCIPVSWRCDGENDCDSGEDEENCGNITCSPDEFTCSSGRCISRNFVCNGQDDCSDGSDELDCAPPTCGAHEFQCSTSSCIPISWVCDDDADCSDQSDESLEQCGRQPVIHTKCPASEIQCGSGECIHKKWRCDGDPDCKDGSDEVNCPSRTCRPDQFECEDGSCIHGSRQCNGIRDCVDGSDEVNCKNVNQCLGPGKFKCRSGECIDISKVCNQEQDCRDWSDEPLKECHINECLVNNGGCSHICKDLVIGYECDCAAGFELIDRKTCGDIDECQNPGICSQICINLKGGYKCECSRGYQMDLATGVCKAVGKEPSLIFTNRRDIRKIGLERKEYIQLVEQLRNTVALDADIAAQKLFWADLSQKAIFSASIDDKVGRHVKMIDNVYNPAAIAVDWVYKTIYWTDAASKTISVATLDGTKRKFLFNSDLREPASIAVDPLSGFVYWSDWGEPAKIEKAGMNGFDRRPLVTADIQWPNGITLDLIKSRLYWLDSKLHMLSSVDLNGQDRRIVLKSLEFLAHPLALTIFEDRVYWIDGENEAVYGANKFTGSELATLVNNLNDAQDIIVYHELVQPSGKNWCEEDMENGGCEYLCLPAPQINDHSPKYTCSCPSGYNVEENGRDCQSTATTVTYSETKDTNTTEISATSGLVPGGINVTTAVSEVSVPPKGTSAAWAILPLLLLVMAAVGGYLMWRNWQHKNMKSMNFDNPVYLKTTEEDLSIDIGRHSASVGHTYPAISVVSTDDDLA

SEQ ID NO: 68438 - protein, 521 aa, Homo sapiens
LLLLLLAAVAPARGWESGDLELFDLVEEVQLNFYQFLGVQQDASSADIRKAYRKLSLTLHPDKNKDENAETQFRQLVAIYEVLKDDERRQRYDDILINGLPDWRQPVFYYRRVRKMSNAELALLLFIILTVGHYAVVWSIYLEKQLDELLSRKKREKKKKTGSKSVDVSKLGASEKNERLLMKPQWHDLLPCKLGIWFCLTLKALPHLIQDAGQFYAKYKETRLKEKEDALTRTELETLQKQKKVKKPKPEFPVYTPLETTYIQSYDHGTSIEEIEEQMDDWLENRNRTQKKQAPEWTEEDLSQLTRSMVKFPGGTPGRWEKIAHELGRSVTDVTTKAKQLKDSVTCSPGMVRLSELKSTVQNSRPIKTATTLPDDMITQREDAEGVAAEEEQEGDSGEQETGATDARPRRRKPARLLEATAKPEPEEKSRAKRQKDFDIAEQNESSDEESLRKERARSAEEPWTQNQQKLLELALQQYPRGSSDRWDKIARCVPSKSKEDCIARYKLLVELVQKKKQAKS

SEQ ID NO: 68439 - protein, 50 aa, Homo sapiens
RGLGAGTLLWTTFSLSAGRATQSPFACGWTTRRTTSTRAIAVQGRHQCSE

SEQ ID NO: 68440 - protein, 158 aa, Homo sapiens
IKPEDAMDFGISLLFYGLYYGVLERDFAEMCADYMASTIGFYSESGMPTKHLSDSVCAVCGQQIFVDVSEEGIIENTYRLSCNHVFHEFCIRGWCIVGKKQTCPYCKEKVDLKRMFSNPWERPHVMYGQLLDWLRYLVAWQPVIIGVVQGINYILGLE

SEQ ID NO: 68441 - protein, 49 aa, Homo sapiens
VMTVAILLVMEGLSAFLHALRLHWVEFQNKFYSGTGYKLSPFTFAATDD

SEQ ID NO: 68442 - protein, 326 aa, Homo sapiens
LAMRSLLLLSAFCLLEAALAAEVKKPAAAAAPGTAEKLSPKAATLAERSAGLAFSLYQAMAKDQAVENILVSPVVVASSLGLVSLGGKATTASQAKAVLSAEQLRDEEVHAGLGELLRSLSNSTARNVTWKLGSRLYGPSSVSFADDFVRSSKQHYNCEHSKINFRDKRSALQSINEWAAQTTDGKLPEVTKDVERTDGALLVNAMFFKPHWDEKFHHKMVDNRGFMVTRSYTVGVMMMHRTGLYNYYDDEKEKLQIVEMPLAHKLSSLIILMPHHVEPLERLEKLLTKEQLKIWMGKMQKKAVAISLPKGVVEVTHDLQVRGGPA

SEQ ID NO: 68443 - protein, 866 aa, Homo sapiens
IPPSQQITMLQTKDLIWTLFFLGTAVSLQVDIVPSQGEISVGESKFFLCQVAGDAKDKDISWFSPNGEKLTPNQQRISVVWNDDSSSTLTIYNANIDDAGIYKCVVTGEDGSESEATVNVKIFQKLMFKNAPTPQEFREGEDAVIVCDVVSSLPPTIIWKHKGRDVILKKDVRFIVLSNNYLQIRGIKKTDEGTYRCEGRILARGEINFKDIQVIVNVPPTIQARQNIVNATANLGQSVTLVCDAEGFPEPTMSWTKDGEQIEQEEDDEKYIFSDDSSQLTIKKVDKNDEAEYICIAENKAGEQDATIHLKVFAKPKITYVENQTAMELEEQVTLTCEASGDPIPSITWRTSTRNISSEEKASWTRPEKQETLDGHMVVRSHARVSSLTLKSIQYTDAGEYICTASNTIGQDSQSMYLEVQYAPKLQGPVAVYTWEGNQVNITCEVFAYPSATISWFRDGQLLPSSNYSNIKIYNTPSASYLEVTPDSENDFGNYNCTAVNRIGQESLEFILVQADTPSSPSIDQVEPYSSTAQVQFDEPEATGGVPILKYKAEWRAVGEEVWHSKWYDAKEASMEGIVTIVGLKPETTYAVRLAALNGKGLGEISAASEFKTQPVQGEPSAPKLEGQMGEDGNSIKVNLIKQDDGGSPIRHYLVRYRALSSEWKPEIRLPSGSDHVMLKSLDWNAEYEVYVVAENQQGKSKAAHFVFRTSAQPTAIPANGSPTSGLSTGAIVGILIVIFVLLLVVVDITCYFLNKCGLFMCIAVNLCGKAGPGAKGKDMEEGKAAFSKDESKEPIVEVRTEEERTPNHDGGKHTEPNETTPLTEPEKGPVEAKPECQETETKPAPAEVKTVPNDATQTKENESKA

SEQ ID NO: 68444 - protein, 18 aa, Homo sapiens
ITALATCLMPGFLSSCMV

SEQ ID NO: 68445 - protein, 534 aa, Homo sapiens
RTRGRMLLAVLYCLLWSFQTSAGHFPRACVSSKNLMEKECCPPWSGDRSPCGQLSGRGSCQNILLSNAPLGPQFPFTGVDDRESWPSVFYNRTCQCSGNFMGFNCGNCKFGFWGPNCTERRLLVRRNIFDLSAPEKDKFFAYLTLAKHTISSDYVIPIGTYGQMKNGSTPMFNDINIYDLFVWMHYYVSMDALLGGSEIWRDIDFAHEAPAFLPWHRLFLLRWEQEIQKLTGDENFTIPYWDWRDAEKCDICTDEYMGGQHPTNPNLLSPASFFSSWQIVCSRLEEYNSHQSLCNGTPEGPLRRNPGNHDKSRTPRLPSSADVEFCLSLTQYESGSMDKAANFSFRNTLEGFASPLTGIADASQSSMHNALHIYMNGTMSQVQGSANDPIFLLHHAFVDSIFEQWLRRHRPLQEVYPEANAPIGHNRESYMVPFIPLYRNGDFFISSKDLGYDYSYLQDSDPDSFQDYIKSYLEQASRIWSWLLGAAMVGAVLTALLAGLVSLLCRHKRKQLPEEKQPLLMEKEDYHSLYQSHL

SEQ ID NO: 68446 - protein, 37 aa, Homo sapiens
LAGIQAVTALLFVWIAGRYERASQGPASHSRFSRDRG

SEQ ID NO: 68447 - protein, 99 aa, Homo sapiens
RPRGLPPLLVVLLGCWASVSAQTDATPAVTTEGLNSTEAALATFGTFPSTRPPGTPRAPGPSSGPRPTPVTDGGYHVPAPGVHSDPTSRGQPRCCSLCL

SEQ ID NO: 68448 - protein, 35 aa, Homo sapiens
LNFCTKISRNSWMPLLSLAFLFPSSRAICSSCSRA

SEQ ID NO: 68449 - protein, 4543 aa, Homo sapiens
LTPPLLLLLPLLSALVAAAIDAPKTCSPKQFACRDQITCISKGWRCDGERDCPDGSDEAPEICPQSKAQRCQPNEHNCLGTELCVPMSRLCNGVQDCMDGSDEGPHCRELQGNCSRLGCQHHCVPTLDGPTCYCNSSFQLQADGKTCKDFDECSVYGTCSQLCTNTDGSFICGCVEGYLLQPDNRSCKAKNEPVDRPPVLLIANSQNILATYLSGAQVSTITPTSTRQTTAMDFSYANETVCWVHVGDSAAQTQLKCARMPGLKGFVDEHTINISLSLHHVEQMAIDWLTGNFYFVDDIDDRIFVCNRNGDTCVTLLDLELYNPKGIALDPAMGKVFFTDYGQIPKVERCDMDGQNRTKLVDSKIVFPHGITLDLVSRLVYWADAYLDYIEVVDYEGKGRQTIIQGILIEHLYGLTVFENYLYATNSDNANAQQKTSVIRVNRFNSTEYQVVTRVDKGGALHIYHQRRQPRVRSHACENDQYGKPGGCSDICLLANSHKARTCRCRSGFSLGSDGKSCKKPEHELFLVYGKGRPGIIRGMDMGAKVPDEHMIPIENLMNPRALDFHAETGFIYFADTTSYLIGRQKIDGTERETILKDGIHNVEGVAVDWMGDNLYWTDDGPKKTISVARLEKAAQTRKTLIEGKMTHPRAIVVDPLNGWMYWTDWEEDPKDSRRGRLERAWMDGSHRDIFVTSKTVLWPNGLSLDIPAGRLYWVDAFYDRIETILLNGTDRKIVYEGPELNHAFGLCHHGNYLFWTEYRSGSVYRLERGVGGAPPTVTLLRSERPPIFEIRMYDAQQQQVGTNKCRVNNGGCSSLCLATPGSRQCACAEDQVLDADGVTCLANPSYVPPPQCQPGEFACANSRCIQERWKCDGDNDCLDNSDEAPALCHQHTCPSDRFKCENNRCIPNRWLCDGDNDCGNSEDESNATCSARTCPPNQFSCASGRCIPISWTCDLDDDCGDRSDESASCAYPTCFPLTQFTCNNGRCININWRCDNDNDCGDNSDEAGCSHSCSSTQFKCNSGRCIPEHWTCDGDNDCGDYSDETHANCTNQATRPPGGCHTDEFQCRLDGLCIPLRWRCDGDTDCMDSSDEKSCEGVTHVCDPSVKFGCKDSARCISKAWVCDGDNDCEDNSDEENCESLACRPPSHPCANNTSVCLPPDKLCDGNDDCGDGSDEGELCDQCSLNNGGCSHNCSVAPGEGIVCSCPLGMELGPDNHTCQIQSYCAKHLKCSQKCDQNKFSVKCSCYEGWVLEPDGESCRSLDPFKPFIIFSNRHEIRRIDLHKGDYSVLVPGLRNTIALDFHLSQSALYWTDVVEDKIYRGKLLDNGALTSFEVVIQYGLATPEGLAVDWIAGNIYWVESNLDQIEVAKLDGTLRTTLLAGDIEHPRAIALDPRDGILFWTDWDASLPRIEAASMSGAGRRTVHRETGSGGWPNGLTVDYLEKRILWIDARSDAIYSARYDGSGHMEVLRGHEFLSHPFAVTLYGGEVYWTDWRTNTLAKANKWTGHNVTVVQRTNTQPFDLQVYHPSRQPMAPNPCEANGGQGPCSHLCLINYNRTVSCACPHLMKLHKDNTTCYEFKKFLLYARQMEIRGVDLDAPYYNYIISFTVPDIDNVTVLDYDAREQRVYWSDVRTQAIKRAFINGTGVETVVSADLPNAHGLAVDWVSRNLFWTSYDTNKKQINVARLDGSFKNAVVQGLEQPHGLVVHPLRGKLYWTDGDNISMANMDGSNRTLLFSGQKGPVGLAIDFPESKLYWISSGNHTINRCNLDGSGLEVIDAMRSQLGKATALAIMGDKLWWADQVSEKMGTCSKADGSGSVVLRNSTTLVMHMKVYDESIQLDHKGTNPCSVNNGDCSQLCLPTSETTRSCMCTAGYSLRSGQQACEGVGSFLLYSVHEGIRGIPLDPNDKSDALVPVSGTSLAVGIDFHAENDTIYWVDMGLSTISRAKRDQTWREDVVTNGIGRVEGIAVDWIAGNIYWTDQGFDVIEVARLNGSFRYVVISQGLDKPRAITVHPEKGYLFWTEWGQYPRIERSRLDGTERVVLVNVSISWPNGISVDYQDGKLYWCDARTDKIERIDLETGENREVVLSSNNMDMFSVSVFEDFIYWSDRTHANGSIKRGSKDNATDSVPLRTGIGVQLKDIKVFNRDRQKGTNVCAVANGGCQQLCLYRGRGQRACACAHGMLAEDGASCREYAGYLLYSERTILKSIHLSDERNLNAPVQPFEDPEHMKNVIALAFDYRAGTSPGTPNRIFFSDIHFGNIQQINDDGSRRITIVENVGSVEGLAYHRGWDTLYWTSYTTSTITRHTVDQTRPGAFERETVITMSGDDHPRAFVLDECQNLMFWTNWNEQHPSIMRAALSGANVLTLIEKDIRTPNGLAIDHRAEKLYFSDATLDKIERCEYDGSHRYVILKSEPVHPFGLAVYGEHIFWTDWVRRAVQRANKHVGSNMKLLRVDIPQQPMGIIAVANDTNSCELSPCRINNGGCQDLCLLTHQGHVNCSCRGGRILQDDLTCRAVNSSCRAQDEFECANGECINFSLTCDGVPHCKDKSDEKPSYCNSRRCKKTFRQCSNGRCVSNMLWCNGADDCGDGSDEIPCNKTACGVGEFRCRDGTCIGNSSRCNQFVDCEDASDEMNCSATDCSSYFRLGVKGVLFQPCERTSLCYAPSWVCDGANDCGDYSDERDCPGVKRPRCPLNYFACPSGRCIPMSWTCDKEDDCEHGEDETHCNKFCSEAQFECQNHRCISKQWLCDGSDDCGDGSDEAAHCEGKTCGPSSFSCPGTHVCVPERWLCDGDKDCADGADESIAAGCLYNSTCDDREFMCQNRQCIPKHFVCDHDRDCADGSDESPECEYPTCGPSEFRCANGRCLSSRQWECDGENDCHDQSDEAPKNPHCTSQEHKCNASSQFLCSSGRCVAEALLCNGQDDCGDSSDERGCHINECLSRKLSGCSQDCEDLKIGFKCRCRPGFRLKDDGRTCADVDECSTTFPCSQRCINTHGSYKCLCVEGYAPRGGDPHSCKAVTDEEPFLIFANRYYLRKLNLDGSNYTLLKQGLNNAVALDFDYREQMIYWTDVTTQGSMIRRMHLNGSNVQVLHRTGLSNPDGLAVDWVGGNLYWCDKGRDTIEVSKLNGAYRTVLVSSGLREPRALVVDVQNGYLYWTDWGDHSLIGRIGMDGSSRSVIVDTKITWPNGLTLDYVTERIYWADAREDYIEFASLDGSNRHVVLSQDIPHIFALTLFEDYVYWTDWETKSINRAHKTTGTNKTLLISTLHRPMDLHVFHALRQPDVPNHPCKVNNGGCSNLCLLSPGGGHKCACPTNFYLGSDGRTCVSNCTASQFVCKNDKCIPFWWKCDTEDDCGDHSDEPPDCPEFKCRPGQFQCSTGICTNPAFICDGDNDCQDNSDEANCDIHVCLPSQFKCTNTNRCIPGIFRCNGQDNCGDGEDERDCPEVTCAPNQFQCSITKRCIPRVWVCDRDNDCVDGSDEPANCTQMTCGVDEFRCKDSGRCIPARWKCDGEDDCGDGSDEPKEECDERTCEPYQFRCKNNRCVPGRWQCDYDNDCGDNSDEESCTPRPCSESEFSCANGRCIAGRWKCDGDHDCADGSDEKDCTPRCDMDQFQCKSGHCIPLRWRCDADADCMDGSDEEACGTGVRTCPLDEFQCNNTLCKPLAWKCDGEDDCGDNSDENPEECARFVCPPNRPFRCKNDRVCLWIGRQCDGTDNCGDGTDEEDCEPPTAHTTHCKDKKEFLCRNQRCLSSSLRCNMFDDCGDGSDEEDCSIDPKLTSCATNASICGDEARCVRTEKAAYCACRSGFHTVPGQPGCQDINECLRFGTCSQLCNNTKGGHLCSCARNFMKTHNTCKAEGSEYQVLYIADDNEIRSLFPGHPHSAYEQAFQGDESVRIDAMDVHVKAGRVYWTNWHTGTISYRSLPPAAPPTTSNRHRRQIDRGVTHLNISGLKMPRGIAIDWVAGNVYWTDSGRDVIEVAQMKGENRKTLISGMIDEPHAIVVDPLRGTMYWSDWGNHPKIETAAMDGTLRETLVQDNIQWPTGLAVDYHNERLYWADAKLSVIGSIRLNGTDPIVAADSKRGLSHPFSIDVFEDYIYGVTYINNRVFKIHKFGHSPLVNLTGGLSHASDVVLYHQHKQPEVTNPCDRKKCEWLCLLSPSGPVCTCPNGKRLDNGTCVPVPSPTPPPDAPRPGTCNLQCFNGGSCFLNARRQPKCRCQPRYTGDKCELDQCWEHCRNGGTCAASPSGMPTCRCPTGFTGPKCTQQVCAGYCANNSTCTVNQGNQPQCRCLPGFLGDRCQYRQCSGYCENFGTCQMAADGSRQCRCTAYFEGSRCEVNKCSRCLEGACVVNKQSGDVTCNCTDGRVAPSCLTCVGHCSNGGSCTMNSKMMPECQCPPHMTGPRCEEHVFSQQQPGHIASILIPLLLLLLLVLVAGVVFWYKRRVQGAKGFQHQRMTNGAMNVEIGNPTYKMYEGGEPDDVGGLLDADFALDPDKPTNFTNPVYATLYMGGHGSRHSLASTDEKRELLGRGPEDEIGDPLA

SEQ ID NO: 68450 - protein, 800 aa, Homo sapiens
LWVLGLCCVLLTFGSVRADDEVDVDGTVEEDLGKSREGSRTDDEVVQREEEAIQLDGLNASQIRELREKSEKFAFQAEVNRMMKLIINSLYKNKEIFLRELISNASDALDKIRLISLTDENALSGNEELTVKIKCDKEKNLLHVTDTGVGMTREELVKNLGTIAKSGTSEFLNKMTEAQEDGQSTSELIGQFGVGFYSAFLVADKVIVTSKHNNDTQHIWESDSNEFSVIADPRGNTLGRGTTITLVLKEEASDYLELDTIKNLVKKYSQFINFPIYVWSSKTETVEEPMEEEEAAKEEKEESDDEAAVEEEEEEKKPKTKKVEKTVWDWELMNDIKPIWQRPSKEVEEDEYKAFYKSFSKESDDPMAYIHFTAEGEVTFKSILFVPTSAPRGLFDEYGSKKSDYIKLYVRRVFITDDFHDMMPKYLNFVKGVVDSDDLPLNVSRETLQQHKLLKVIRKKLVRKTLDMIKKIADDKYNDTFWKEFGTNIKLGVIEDHSNRTRLAKLLRFQSSHHPTDITSLDQYVERMKEKQDKIYFMAGSSRKEAESSPFVERLLKKGYEVIYLTEPVDEYCIQALPEFDGKRFQNVAKEGVKFDESEKTKESREAVEKEFEPLLNWMKDKALKDKIEKAVVSQRLTESPCALVASQYGWSGNMERIMKAQAYQTGKDISTNYYASQKKTFEINPRHPLIRDMLRRIKEDEDDKTVLDLAVVLFETATLRSGYLLPDTKAYGDRIERMLRLSLNIDPDAKVEEEPEEEPEETAEDTTEDTEQDEDEEMDVGTDEEEETAKESTAEKDEL

SEQ ID NO: 68451 - protein, 12 aa, Homo sapiens
RQVITGIYFLFF

SEQ ID NO: 68452 - protein, 48 aa, Homo sapiens
LNLRWALSVLCVLLMAETVSGTRGSSTGAHISPQFPASVPQGVWPECL

SEQ ID NO: 68453 - protein, 18 aa, Homo sapiens
LVTVILMAFCVYKPIRRR

SEQ ID NO: 68454 - protein, 24 aa, Homo sapiens
LRVKGLKLADRVLALICWLFPAPL

SEQ ID NO: 68455 - protein, 148 aa, Homo sapiens
LAATFLLLALSTAAQAEPVQFKDCGSVDGVIKEVNVSPCPTQPCQLSKGQSYSVNVTFTSNIQSKSSKAVVHGILMGVPVPFPIPEPDGCKSGINCPIQKDKTYSYLNKLPVKSEYPSIKLVVEWQLQDDKNQSLFCWEIPVQIVSHL

SEQ ID NO: 68456 - protein, 333 aa, Homo sapiens
MLMFAVIVASSGLLLMIERGILAEMKPLPLHPPGREGTAWRGKAPKPGGLSLRAGDADLQVRQDVRNRTLRAVCGQPGMPRDPWDLPVGQRRTLLRHILVSDRYRFLYCYVPKVACSNWKRVMKVLAGVLDSVDVRLKMDHRSDLVFLADLRPEEIRYRLQHYFKFLFVREPLERLLSAYRNKFGEIREYQQRYGAEIVRRYRAGAGPSPAGDDVTFPEFLRYLVDEDPERMNEHWMPVYHLCQPCAVHYDFVGSYERLEADANQVLEWVRAPPHVRFPARQAWYRPASPESLHYHLCSAPRALLQDVLPKYILDFSLFAYPLPNVTKEACQQ

SEQ ID NO: 68457 - protein, 498 aa, Homo sapiens
LFPGVALLLAAARLAAASDVLELTDDNFESRISDTGSAGLMLVEFFAPWCGHCKRLAPEYEAAATRLKGIVPLAKVDCTANTNTCNKYGVSGYPTLKIFRDGEEAGAYDGPRTADGIVSHLKKQAGPASVPLRTEEEFKKFISDKDASIVGFFDDSFSEAHSEFLKAASNLRDNYRFAHTNVESLVNEYDDNGEGIILFRPSHLTNKFEDKTVAYTEQKMTSGKIKKFIQENIFGICPHMTEDNKDLIQGKDLLIAYYDVDYEKNAKGSNYWRNRVMMVAKKFLDAGHKLNFAVASRKTFSHELSDFGLESTAGEIPVVAIRTAKGEKFVMQEEFSRDGKALERFLQDYFDGNLKRYLKSEPIPESNDGPVKVVVAENFDEIVNNENKDVLIEFYAPWCGHCKNLEPKYKELGEKLSKDPNIVIAKMDATANDVPSPYEVRGFPTIYFSPANKKLNPKKYEGGRELSDFISYLQREATNPPVIQEEKPKKKKKAQEDL

SEQ ID NO: 68458 - protein, 84 aa, Homo sapiens
IAAFRKCIRPTMEPTLMLLAGLLIMYRDSCIVVEFTTTQTGKIQIGSKKPKTRVSLLAAAERLPAIVMAAWPTLPTSMLRGVRL

SEQ ID NO: 68459 - protein, 20 aa, Homo sapiens
LLAALCGALLCAPSLLVALG

SEQ ID NO: 68460 - protein, 2307 aa, Homo sapiens
LALTLTMLARLASAASFFGENHLEVPVATALTDIDLQLQFSTSQPEALLLLAAGPADHLLLQLYSGRLQVRLVLGQEELRLQTPAETLLSDSIPHTVVLTVVEGWATLSVDGFLNASSAVPGAPLEVPYGLFVGGTGTLGLPYLRGTSRPLRGCLHAATLNGRSLLRPLTPDVHEGCAEEFSASDDVALGFSGPHSLAAFPAWGTQDEGTLEFTLTTQSRQAPLAFQAGGRRGDFIYVDIFEGHLRAVVEKGQGTVLLHNSVPVADGQPHEVSVHINAHRLEISVDQYPTHTSNRGVLSYLEPRGSLLLGGLDAEASRHLQEHRLGLTPEATNASLLGCMEDLSVNGQRRGLREALLTRNMAAGCRLEEEEYEDDAYGHYEAFSTLAPEAWPAMELPEPCVPEPGLPPVFANFTQLLTISPLVVAEGGTAWLEWRHVQPTLDLMEAELRKSQVLFSVTRGARHGELELDIPGAQARKMFTLLDVVNRKARFIHDGSEDTSDQLVLEVSVTARVPMPSCLRRGQTYLLPIQVNPVNDPPHIIFPHGSLMVILEHTQKPLGPEVFQAYDPDSACEGLTFQVLGTSSGLPVERRDQPGEPATEFSCRELEAGSLVYVHRGGPAQDLTFRVSDGLQASPPATLKVVAIRPAIQIHRSTGLRLAQGSAMPILPANLSVETNAVGQDVSVLFRVTGALQFGELQKQGAGGVEGAEWWATQAFHQRDVEQGRVRYLSTDPQHHAYDTVENLALEVQVGQEILSNLSFPVTIQRATVWMLRLEPLHTQNTQQETLTTAHLEATLEEAGPSPPTFHYEVVQAPRKGNLQLQGTRLSDGQGFTQDDIQAGRVTYGATARASEAVEDTFRFRVTAPPYFSPLYTFPIHIGGDPDAPVLTNVLLVVPEGGEGVLSADHLFVKSLNSASYLYEVMERPRHGRLAWRGTQDKTTMVTSFTNEDLLRGRLVYQHDDSETTEDDIPFVATRQGESSGDMAWEEVRGVFRVAIQPVNDHAPVQTISRIFHVARGGRRLLTTDDVAFSDADSGFADAQLVLTRKDLLFGSIVAVDEPTRPIYRFTQEDLRKRRVLFVHSGADRGWIQLQVSDGQHQATALLEVQASEPYLRVANGSSLVVPQGGQGTIDTAVLHLDTNLDIRSGDEVHYHVTAGPRWGQLVRAGQPATAFSQQDLLDGAVLYSHNGSLSPRDTMAFSVEAGPVHTDATLQVTIALEGPLAPLKLVRHKKIYVFQGEAAEIRRDQLEAAQEAVPPADIVFSVKSPPSAGYLVMVSRGALADEPPSLDPVQSFSQEAVDTGRVLYLHSRPEAWSDAFSLDVASGLGAPLEGVLVELEVLPAAIPLEAQNFSVPEGGSLTLAPPLLRVSGPYFPTLLGLSLQVLEPPQHGALQKEDGPQARTLSAFSWRMVEEQLIRYVHDGSETLTDSFVLMANASEMDRQSHPVAFTVTVLPVNDQPPILTTNTGLQMWEGATAPIPAEALRSTDGDSGSEDLVYTIEQPSNGRVVLRGAPGTEVRSFTQAQLDGGLVLFSHRGTLDGGFRFRLSDGEHTSPGHFFRVTAQKQVLLSLKGSQTLTVCPGSVQPLSSQTLRASSSAGTDPQLLLYRVVRGPQLGRLFHAQQDSTGEALVNFTQAEVYAGNILYEHEMPPEPFWEAHDTLELQLSSPPARDVAATLAVAVSFEAACPQRPSHLWKNKGLWVPEGQRARITVAALDASNLLASVPSPQRSEHDVLFQVTQFPSRGQLLVSEEPLHAGQPHFLQSQLAAGQLVYAHGGGGTQQDGFHFRAHLQGPAGASVAGPQTSEAFAITVRDVNERPPQPQASVPLRLTRGSRAPISRAQLSVVDPDSAPGEIEYEVQRAPHNGFLSLVGGGLGPVTRFTQADVDSGRLAFVANGSSVAGIFQLSMSDGASPPLPMSLAVDILPSAIEVQLRAPLEVPQALGRSSLSQQQLRVVSDREEPEAAYRLIQGPQYGHLLVGGRPTSAFSQFQIDQGEVVFAFTNFSSSHDHFRVLALARGVNASAVVNVTVRALLHVWAGGPWPQGATLRLDPTVLDAGELANRTGSVPRFRLLEGPRHGRVVRVPRARTEPGGSQLVEQFTQQDLEDGRLGLEVGRPEGRAPGPAGDSLTLELWAQGVPPAVASLDFATEPYNAARPYSVALLSVPEAARTEAGKPESSTPTGEPGPMASSPEPAVAKGGFLSFLEANMFSVIIPMCLVLLLLALILPLLFYLRKRNKTGKHDVQVLTAKPRNGLAGDTETFRKVEPGQAIPLTAVPGQGPPPGGQPDPELLQFCRTPNPALKNGQYWV

SEQ ID NO: 68461 - protein, 23 aa, Homo sapiens
IWPRSRFGITGQLMAILTLVPRT

SEQ ID NO: 68462 - protein, 27 aa, Homo sapiens
LSYILVLLLDLAWANTFVIRMLPSWRN

SEQ ID NO: 68463 - protein, 685 aa, Homo sapiens
TTLFLLSLLFLVQGAHGRGHREDFRFCSQRNQTHRSSLHYKPTPDLRISIENSEEALTVHAPFPAAHPASRSFPDPRGLYHFCLYWNRHAGRLHLLYGKRDFLLSDKASSLLCFQHQEESLAQGPPLLATSVTSWWSPQNISLPSAASFTFSFHSPPHTAAHNASVDMCELKRDLQLLSQFLKHPQKASRRPSAAPASQQLQSLESKLTSVRFMGDMVSFEEDRINATVWKLQPTAGLQDLHIHSRQEEEQSEIMEYSVLLPRTLFQRTKGRSGEAEKRLLLVDFSSQALFQDKNSSQVLGEKVLGIVVQNTKVANLTEPVVLTFQHQLQPKNVTLQCVFWVEDPTLSSPGHWSSAGCETVRRETQTSCFCNHLTYFAVLMVSSVEVDAVHKHYLSLLSYVGCVVSALACLVTIAAYLCSRVPLPCRRKPRDYTIKVHMNLLLAVFLLDTSFLLSEPVALTGSEAGCRASAIFLHFSLLTCLSWMGLEGYNLYRLVVEVFGTYVPGYLLKLSAMGWGFPIFLVTLVALVDVDNYGPIILAVHRTPEGVIYPSMCWIRDSLVSYITNLGLFSLVFLFNMAMLATMVVQILRLRPHTQKWSHVLTLLGLSLVLGLPWALIFFSFASGTFQLVVLYLFSIITSFQGFLIFIWYWSMRLQARGGPSPLKSNSDSARLPISSGSTSSSRI

SEQ ID NO: 68464 - protein, 11 aa, Homo sapiens
LMMPLLVTLWS

SEQ ID NO: 68465 - protein, 11 aa, Homo sapiens
TCVAGTFFILC

SEQ ID NO: 68466 - protein, 52 aa, Homo sapiens
TMLFTGYFVLCCSWSFRRLKKLCRPLPWKSTVPPCIGVAKTTGDCRSKTCLD

SEQ ID NO: 68467 - protein, 39 aa, Homo sapiens
LLLGAYVLVYYNLVKAPPCGGMGNLRGRTAVVTGECGGG

SEQ ID NO: 68468 - protein, 18 aa, Homo sapiens
ILKVAFLISCLTGWRSSS

SEQ ID NO: 68469 - protein, 109 aa, Homo sapiens
VPTLTGAFGILAAHVPTLQVLRPGLVVVHAEDGTTSKYFVSSGSIAVNADSSVQLLAEEAVTLDMLDLGAAKANLEKAQAELVGTADEATRAEIQIRIEANEALVKALE

SEQ ID NO: 68470 - protein, 82 aa, Homo sapiens
RLFLSLPVLVVVLSIVLEGPAPAQGTPDVSSALDKLKEFGNTLEDKARELISRIKQSELSAKMREWFSETFQKVKEKLKIDS

SEQ ID NO: 68471 - protein, 635 aa, Homo sapiens
LPWSLLLFSLMCETSAFYVPGVAPINFHQNDPVEIKAVKLTSSRTQLPYEYYSLPFCQPSKITYKAENLGEVLRGDRIVNTPFQVLMNSEKKCEVLCSQSNKPVTLTVEQSRLVAERITEDYYVHLIADNLPVATRLELYSNRDSDDKKKEKDVQFEHGYRLGFTDVNKIYLHNHLSFILYYHREDMEEDQEHTYRVVRFEVIPQSIRLEDLKADEKSSCTLPEGTNSSPQEIDPTKENQLYFTYSVHWEESDIKWASRWDTYLTMSDVQIHWFSIINSVVVVFFLSGILSMIIIRTLRKDIANYNKEDDIEDTMEESGWKLVHGDVFRPPQYPMILSSLLGSGIQLFCMILIVIFVAMLGMLSPSSRGALMTTACFLFMFMGVFGGFSAGRLYRTLKGHRWKKGAFCTATLYPGVVFGICFVLNCFIWGKHSSGAVPFPTMVALLCMWFGISLPLVYLGYYFGFRKQPYDNPVRTNQIPRQIPEQRWYMNRFVGILMAGILPFGAMFIELFFIFSAIWENQFYYLFGFLFLVFIILVVSCSQISIVMVYFQLCAEDYRWWWRNFLVSGGSAFYVLVYAIFYFVNKLDIVEFIPSLLYFGYTALMVLSFWLLTGTIGFYAAYMFVRKIYAAVKID

SEQ ID NO: 68472 - protein, 38 aa, Homo sapiens
LLLLLAALVAPATAATAYRPDWNRLSGLTRARVETCGG

SEQ ID NO: 68473 - protein, 55 aa, Homo sapiens
VPPIIGAVILFFVPLMHQRMFKKEQRDSSKDKMLAPDPDPNGELLPGSPNPEEPI

SEQ ID NO: 68474 - protein, 36 aa, Homo sapiens
KKGQNRWGVRLLLVGGLPAFRASGGGEAAAPGSSVC

SEQ ID NO: 68475 - protein, 38 aa, Homo sapiens
IAVAVLYLALQVYGVEVPAEVEAEKPWWQIYTMDTEIP

SEQ ID NO: 68476 - protein, 265 aa, Homo sapiens [sequence omitted]

SEQ ID NO: 68477 - protein, 1094 aa, Homo sapiens [sequence omitted]

SEQ ID NO: 68478 - protein, 75 aa, Homo sapiens
MSDVGFLIISILALLGVFGRLTLQPALHCAVCIRKPAHSAGVSSINKHQPQAPLSFDGNPLEFNFQIQILGTVGS

SEQ ID NO: 68479 - protein, 475 aa, Homo sapiens [sequence omitted]

SEQ ID NO: 68480 - protein, 94 aa, Homo sapiens [sequence omitted]

SEQ ID NO: 68481 - protein, 95 aa, Homo sapiens
MVLVFTIGLTLLLGVQAMPANRLSCYRKILKDHNCHNLPEGVADLTQIDVNVQDHFWDGKGCEMICYCNFSELLCCPKDVFFGPKISFVIPCNNQ

SEQ ID NO: 68482 - protein, 274 aa, Homo sapiens
MLLALLLATLLAAMLALLTQVALVVQVAEAARAPSVSAKPGPALWPLPLLVKMTPNLLHLAPENFYISHSPNSTAGPSCTLLEEAFRRYHGYIFGFYKWHHEPAEFQAKTQVQQLLVSITLQSECDAFPNISSDESYTLLVKEPVAVLKANRVWGALRGLETFSQLVYQDSYGTFTINESTIIDSPRFSHRGILIDTSRHYLPVKIILKTLDAMAFNKFNVLHWHIVDDQSFPYQSITFPELSNKVSKLYCTLSTKTLGIVSLQVCSLNVCSYG

SEQ ID NO: 68483 - protein, 223 aa, Homo sapiens
MLTLVFLVLWMCVFSQDPGSKAVADRYAVYWNSSNPRFQRGDYHIDVCINDYLDVFCPHYEDSVPEDKTERYVLYMVNFDGYSACDHTSKGFKRWECNRPHSPNGPLKFSEKFQLFTPFSLGFEFRPGREYFYISSAIPDNGRRSCLKLKVFVRPTNSCMKTIGVHDRVFDVNDKVENSLEPADDTVHESAEPSRGENAAQTPRIPSRLLAILLFLLAMLLTL

SEQ ID NO: 68484 - protein, 66 aa, Homo sapiens
MGLSVLLGLLALMATAAVARGWLRAGEERSGRPAWPRSFFPVGIGEHLQSFTTCQLCDSIKYLLQK

SEQ ID NO: 68485 - protein, 1299 aa, Homo sapiens
MPKKKRLSAGRVPLILFLCQMISALEVPLDPKLLEDLVQPPTITQQSPKDYIIDPRENIVIQCEAKGKPPPSFSWTRNGTHFDIDKDPLVTMKPGTGTLIINIMSEGKAETYEGVYQCTARNERGAAVSNNIVVRPSRSPLWTKEKLEPITLQSGQSLVLPCRPPIGLPPPIIFWMDNSFQRLPQSERVSQGLNGDLYFSNVLPEDTREDYICYARFNHTQTIQQKQPISVKVISVDELNDTIAANLSDTEFYGAKSSRERPPTFLTPEGNASNKEELRGNVLSLECIAEGLPTPIIYWAKEDGMLPKNRTVYKNFEKTLQIIHVSEADSGNYQCIAKNALGAIHHTISVRVKAAPYWITAPQNLVLSPGEDGTLICRANGNPKPRISWLTNGVPIEIAPDDPSRKIDGDTIIFSNVQERSSAVYQCNASNEYGYLLANAFVNVLAEPPRILTPANTLYQVIANRPALLDCAFFGSPLPTIEWFKGAKGSALHEDIYVLHENGTLEIPVAQKDSTGTYTCVARNKLGMAKNEVHLEIKDPTWIVKQPEYAVVQRGSMVSFECKVKHDHTLSLTVLWLKDNRELPSDERFTVDKDHLVVADVSDDDSGTYTCVANTTLDSVSASAVLSVVAPTPTPAPVYDVPNPPFDLELTDQLDKSVQLSWTPGDDNNSPITKFIIEYEDAMHKPGLWHHQTEVSGTQTTAQLKLSPYVNYSFRVMAVNSIGKSLPSEASEQYLTKASEPDKNPTAVEGLGSEPDNLVITWKPLNGFESNGPGLQYKVSWRQKDGDDEWTSVVVANVSKYIVSGTPTFVPYLIKVQALNDMGFAPEPAVVMGHSGEDLPMVAPGNVRVNVVNSTLAEVHWDPVPLKSIRGHLQGYRIYYWKTQSSSKRNRRHIEKKILTFQGSKTHGMLPGLEPFSHYTLNVRVVNGKGEGPASPDRVFNTPEGVPSAPSSLKIVNPTLDSLTLEWDPPSHPNGILTEYTLKYQPINSTHELGPLVDLKIPANKTRWTLKNLNFSTRYKFYFYAQTSAGSGSQITEEAVTTVDEAGILPPDVGAGKVQAVNPRISNLTAAAAETYANISWEYEGPEHVNFYVEYGVAGSKEEWRKEIVNGSRSFFGLKGLMPGTAYKVRVGAVGDSGFVSSEDVFETGPAMASRQVDIATQGWFIGLMCAVALLILILLIVCFIRRNKGGKYPVKEKEDAHADPEIQPMKEDDGTFGEYSDAEDHKPLKKGSRTPSDRTVKKEDSDDSLVDYGEGVNGQFNEDGSFIGQYSGKKEKEPAEGNESSEAPSPVNAMNSFV

SEQ ID NO: 68486 - protein, 1925 aa, Homo sapiens
MTQLLAGVFLAFLALATEGGVLKKVIRHKRQSGVNATLPEENQPVVFNHVYNIKLPVGSQCSVDLESASGEKDLAPPSEPSESFQEHTVDGENQIVFTHRINIPRRACGCAAAPDVKELLSRLEELENLVSSLREQCTAGAGCCLQPATGRLDTRPFCSGRGNFSTEGCGCVCEPGWKGPNCSEPECPGNCHLRGRCIDGQCICDDGFTGEDCSQLACPSDCNDQGKCVNGVCICFEGYAGADCSREICPVPCSEEHGTCVDGLCVCHDGFAGDDCNKPLCLNNCYNRGRCVENECVCDEGFTGEDCSELICPNDCFDRGRCINGTCYCEEGFTGEDCGKPTCPHACHTQGRCEEGQCVCDEGFAGVDCSEKRCPADCHNRGRCVDGRCECDDGFTGADCGELKCPNGCSGHGRCVNGQCVCDEGYTGEDCSQLRCPNDCHSRGRCVEGKCVCEQGFKGYDCSDMSCPNDCHQHGRCVNGMCVCDDGYTGEDCRDRQCPRDCSNRGLCVDGQCVCEDGFTGPDCAELSCPNDCHGQGRCVNGQCVCHEGFMGKDCKEQRCPSDCHGQGRCVDGQCICHEGFTGLDCGQHSCPSDCNNLGQCVSGRCICNEGYSGEDCSEVSPPKDLVVTEVTEETVNLAWDNEMRVTEYLVVYTPTHEGGLEMQFRVPGDQTSTIIQELEPGVEYFIRVFAILENKKSIPVSARVATYLPAPEGLKFKSIKETSVEVEWDPLDIAFETWEIIFRNMNKEDEGEITKSLRRPETSYRQTGLAPGQEYEISLHIVKNNTRGPGLKRVTTTRLDAPSQIEVKDVTDTTALITWFKPLAEIDGIELTYGIKDVPGDRTTIDLTEDENQYSIGNLKPDTEYEVSLISRRGDMSSNPAKETFTTGLDAPRNLRRVSQTDNSITLEWRNGKAAIDSYRIKYAPISGGDHAEVDVPKSQQATTKTTLTGLRPGTEYGIGVSAVKEDKESNPATINAATELDTPKDLQVSETAETSLTLLWKTPLAKFDRYRLNYSLPTGQWVGVQLPRNTTSYVLRGLEPGQEYNVLLTAEKGRHKSKPARVKASTEQAPELENLTVTEVGWDGLRLNWTAADQAYEHFIIQVQEANKVEAARNLTVPGSLRAVDIPGLKAATPYTVSIYGVIQGYRTPVLSAEASTGETPNLGEVVVAEVGWDALKLNWTAPEGAYEYFFIQVQEADTVEAAQNLTVPGGLRSTDLPGLKAATHYTITIRGVTQDFSTTPLSVEVLTEEVPDMGNLTVTEVSWDALRLNWTTPDGTYDQFTIQVQEADQVEEAHNLTVPGSLRSMEIPGLRAGTPYTVTLHGEVRGHSTRPLAVEVVTEDLPQLGDLAVSEVGWDGLRLNWTAADNAYEHFVIQVQEVNKVEAAQNLTLPGSLRAVDIPGLEAATPYRVSIYGVIRGYRTPVLSAEASTAMGSPKEVIFSDITENSATVSWRAPTAQVESFRITYVPITGGTPSMVTVDGTKTQTRLVKLIPGVEYLVSIIAMKGFEESEPVSGSFTTALDGPSGLVTANITDSEALARWQPAIATVDSYVISYTGEKVPEITRTVSGNTVEYALTDLEPATEYTLRIFAEKGPQKSSTITAKFTTDLDSPRDLTATEVQSETALLTWRPPRASVTGYLLVYESVDGTVKEVIVGPDTTSYSLADLSPSTHYTAKIQALNGPLRSNMIQTIFTTIGLLYPFPKDCSQAMLNGDTTSGLYTIYLNGDKAEALEVFCDMTSDGGGWIVFLRRKNGRENFYQNWKAYAAGFGDRREEFWLGLDNLNKITAQGQYELRVDLRDHGETAFAVYDKFSVGDAKTRYKLKVEGYSGTAGDSMAYHNGRSFSTFDKDTDSAITNCALSYKGAFWYRNCHRVNLMGRYGDNNHSQGVNWFHWKGHEHSIQFAEMKLRPSNFRNLEGRRKRA

SEQ ID NO: 68487 - protein, 14 aa, Homo sapiens
VLLWAMVLLVKHVS

SEQ ID NO: 68488 - protein, 381 aa, Homo sapiens
RSPLCWLLPLLILASVAQGQPTRRPRPGTGPGRRPRPRPRPTPSFPQPDEPAEPTDLPPPLPPGPPSIFPDCPRECYCPPDFPSALYCDSRNLRKVPVIPPRIHYLYLQNNFITELPVESFQNATGLRWINLDNNRIRKIDQRVLEKLPGLVFLYMEKNQLEEVPSALPRNLEQLRLSQNHISRIPPGVFSKLENLLLLDLQHNRLSDGVFKPDTFHGLKNLMQLNLAHNILRKMPPRVPTAIHQLYLDSNKIETIPNGYFKSFPNLAFIRLNYNKLTDRGLPKNSFNISNLLVLHLSHNRISSVPAINNRLEHLYLNNNSIEKINGTQICPNDLVAFHDFSSDLENVPHLRYLRLDGNYLKPPIPLDLMMCFRLLQSVVI

SEQ ID NO: 68489 - protein, 59 aa, Homo sapiens
IVFLLLIMLIFLGHYLIRHKGTYLTHEAKGSDDAPDADTAIINAEGGQSGGDDKKEYFI

SEQ ID NO: 68490 - protein, 191 aa, Homo sapiens
VGICLILIVIFMITKFVQDRHRARRNRLRKDQLKKLPVHKFKKGDEYDVCAICLDEYEDGDKLRILPCSHAYHCKCVDPWLTKTKKTCPVCKQKVVPSQGDSDSDTDSSQEENEVTEHTPLLRPLASVSAQSFGALSESRSHQNMTESSDYEEDDNEDTDSSDAENEINEHDVVVQLQPNGERDYNIANTV

SEQ ID NO: 68491 - protein, 45 aa, Homo sapiens
VFGFIASFMFLLDFITMLYEKRQESQLRKPENTTRAEALTEPLNA

SEQ ID NO: 68492 - protein, 19 aa, Homo sapiens
KMARASLWRAGGTLTLTAL

SEQ ID NO: 68493 - protein, 50 aa, Homo sapiens
IAGLVLLGSVVSGAVVAAVIWRKKSSGGKGGSYSKAEWSDSAQGSESHSL

SEQ ID NO: 68494 - protein, 1360 aa, Homo sapiens
TRTLLLLAVTLCLATCQSLQEETVRKGPAGDRGPRGERGPPGPPGRDGEDGPTGPPGPPGPPGPPGLGGNFAAQYDGKGVGLGPGPMGLMGPRGPPGAAGAPGPQGFQGPAGEPGEPGQTGPAGARGPAGPPGKAGEDGHPGKPGRPGERGVVGPQGARGFPGTPGLPGFKGIRGHNGLDGLKGQPGAPGVKGEPGAPGENGTPGQTGARGLPGERGRVGAPGPAGARGSDGSVGPVGPAGPIGSAGPPGFPGAPGPKGEIGAVGNAGPAGPAGPRGEVGLPGLSGPVGPPGNPGANGLTGAKGAAGLPGVAGAPGLPGPRGIPGPVGAAGATGARGLVGEPGPAGSKGESGNKGEPGSAGPQGPPGPSGEEGKRGPNGEAGSAGPPGPPGLRGSPGSRGLPGADGRAGVMGPPGSRGASGPAGVRGPNGDAGRPGEPGLMGPRGLPGSPGNIGPAGKEGPVGLPGIDGRPGPIGPAGARGEPGNIGFPGPKGPTGDPGKNGDKGHAGLAGARGAPGPDGNNGAQGPPGPQGVQGGKGEQGPPGPPGFQGLPGPSGPAGEVGKPGERGLHGEFGLPGPAGPRGERGPPGESGAAGPTGPIGSRGPSGPPGPDGNKGEPGVVGAVGTAGPSGPSGLPGERGAAGIPGGKGEKGEPGLRGEIGNPGRDGARGAPGAVGAPGPAGATGDRGEAGAAGPAGPAGPRGSPGERGEVGPAGPNGFAGPAGAAGQPGAKGERGAKGPKGENGVVGPTGPVGAAGPAGPNGPPGPAGSRGDGGPPGMTGFPGAAGRTGPPGPSGISGPPGPPGPAGKEGLRGPRGDQGPVGRTGEVGAVGPPGFAGEKGPSGEAGTAGPPGTPGPQGLLGAPGILGLPGSRGERGLPGVAGAVGEPGPLGIAGPPGARGPPGAVGSPGVNGAPGEAGRDGNPGNDGPPGRDGQPGHKGERGYPGNIGPVGAAGAPGPHGPVGPAGKHGNRGETGPSGPVGPAGAVGPRGPSGPQGIRGDKGEPGEKGPRGLPGLKGHNGLQGLPGIAGHHGDQGAPGSVGPAGPRGPAGPSGPAGKDGRTGHPGTVGPAGIRGPQGHQGPAGPPGPPGPPGPPGVSGGGYDFGYDGDFYRADQPRSAPSLRPKDYEVDATLKSLNNQIETLLTPEGSRKNPARTCRDLRLSHPEWSSGYYWIDPNQGCTMDAIKVYCDFSTGETCIRAQPENIPAKNWYRSSKDKKHVWLGETINAGSQFEYNVEGVTSKEMATQLAFMRLLANYASQNITYHCKNSIAYMDEETGNLKKAVILQGSNDVELVAEGNSRFTYTVLVDGCSKKTNEWGKTIIEYKTNKPSRLPFLDIAPLDIGGADQEFFVDIGPVCFK

SEQ ID NO: 68495 - protein, 14 aa, Homo sapiens
LCLLLLGVLNLETM

SEQ ID NO: 68496 - protein, 84 aa, Homo sapiens
KPPKWRVRLQKGVLLVSVLLRAEEEVGVHLSTIPRLLATASSWGKPQGKTLRNGFLHEALDEMTTPQQTTPQTKKNDMMQSSGK

SEQ ID NO: 68497 - protein, 57 aa, Homo sapiens
IALLVALAFVCWRKIKQSCEEENAGAEDQDGEGEGSKTALQPLKHSDSKEDDGQEIA

SEQ ID NO: 68498 - protein, 53 aa, Homo sapiens
LIICVLVGMVWCSVRQKGSYLTHEASGLDEQGEAREAFLNGSDGHKRKEEFFI

SEQ ID NO: 68499 - protein, 54 aa, Homo sapiens
LYSLLFRRTSTFALTIIVGVMFFERAFDQGADAIYDHINEGKLWKHIKHKYENK

SEQ ID NO: 68500 - protein, 180 aa, Homo sapiens
TESREEAMAAMASLGALALLLLSSLSRCSAEACLEPQITPSYYTTSDAVISTETVFIVEISLTCKNRVQNMALYADVGGKQFPVTRGQDVGRYQVSWSLDHKSAHAGTYEVRFFDEESYSLLRKAQRNNEDISIIPPLFTVSVDHRGTWNGPWVSTEVLAAAIGLVIYYLAFSAKSHIQA

SEQ ID NO: 68501 - protein, 1539 aa, Homo sapiens
MTPACPLLLSVILSLRLATAFDPAPSACSALASGVLYGAFSLQDLFPTIASGCSWTLENPDPTKYSLYLRFNRQEQVCAHFAPRLLPLDHYLVNFTCLRPSPEEAVAQAESEVGRPEEEEAEAAAGLELCSGSGPFTFLHFDKNFVQLCLSAEPSEAPRLLAPAALAFRFVEVLLINNNNSSQFTCGVLCRWSEECGRAAGRACGFAQPGCSCPGEAGAGSTTTTSPGPPAAHTLSNALVPGGPAPPAEADLHSGSSNDLFTTEMRYGEEPEEEPKVKTQWPRSADEPGLYMAQTGDPAAEEWSPWSVCSLTCGQGLQVRTRSCVSSPYGTLCSGPLRETRPCNNSATCPVHGVWEEWGSWSLCSRSCGRGSRSRMRTCVPPQHGGKACEGPELQTKLCSMAACPVEGQWLEWGPWGPCSTSCANGTQQRSRKCSVAGPAWATCTGALTDTRECSNLECPATDSKWGPWNAWSLCSKTCDTGWQRRFRMCQATGTQGYPCEGTGEEVKPCSEKRCPAFHEMCRDEYVMLMTWKKAAAGEIIYNKCPPNASGSASRRCLLSAQGVAYWGLPSFARCISHEYRYLYLSLREHLAKGQRMLAGEGMSQVVRSLQELLARRTYYSGDLLFSVDILRNVTDTFKRATYVPSADDVQRFFQVVSFMVDAENKEKWDDAQQVSPGSVHLLRVVEDFIHLVGDALKAFQSSLIVTDNLVISIQREPVSAVSSDITFPMRGRRGMKDWVRHSEDRLFLPKEVLSLSSPGKPATSGAAGSPGRGRGPGTVPPGPGHSHQRLLPADPDESSYFVIGAVLYRTLGLILPPPRPPLAVTSRVMTVTVRPPTQPPAEPLITVELSYIINGTTDPHCASWDYSRADASSGDWDTENCQTLETQAAHTRCQCQHLSTFAVLAQPPKDLTLELAGSPSVPLVIGCAVSCMALLTLLAIYAAFWRFIKSERSIILLNFCLSILASNILILVGQSRVLSKGVCTMTAAFLHFFFLSSFCWVLTEAWQSYLAVIGRMRTRLVRKRFLCLGWGLPALVVAVSVGFTRTKGYGTSSYCWLSLEGGLLYAFVGPAAVIVLVNMLIGIIVFNKLMARDGISDKSKKQRAGASLWSSCVVLPLLALTWMSAVLAMTDRRSVLFQALFAVFNSAQGFVITAVHCFLRREVQDVVKCQMGVCRADESEDSPDSCKNGQLQILSDFEKDVDLACQTVLFKEVNTCNPSTITGTLSRLSLDEDEEPKSCLVGPEGSLSFSPLPGNILVPMAASPGLGEPPPPQEANPVYMCGEGGLRQLDLTWLRPTEPGSEGDYMVLPRRTLSLQPGGGGGGGEDAPRARPEGTPRRAAKTVAHTEGYPSFLSVDHSGLGLGPAYGSLQNPYGMTFQPPPPTPSARQVPEPGERSRTMPRTVPGSTMKMGSLERKKLRYSDLDFEVMHTRKRHSELYHELNQKFHTFDRYRSQSTAKREKRWSVSSGGAAERSVCTDKPSPGERPSLSQHRRHQSWSTFKSMTLGSLPPKPRERLTLHRAAAWEPTEPPDGDFQTEV

SEQ ID NO: 68502 - protein, 163 aa, Homo sapiens
MAPPVRLERPFPSRRFPGLLLAALVLLLSSFSDAYEEPPTFEAMELIGKPKPYYEIGEQVDYKCKKGHFYVPPLATHTICDRNHTWLPVSDEPCYRKTCPCIGDPLHGQAVLANGTYELGYQIHFICNEGYYLIGKEILYCELKGSVAVWSSKPPICEKILCT

SEQ ID NO: 68503 - protein, 438 aa, Homo sapiens
MSTTIIAAVLGVILVLAIHPGNPKLKKQLGPGKKNDEVSSLDAFLDLIRNLFPENLVQACFQQIQTVTKKVLVAPPPDEEANATSAVVSLLNETVTEVPEETKMVIKKGLEFKDGMNVLGLIGFFIAFGIAMGKMGDQAKLMVDFFNILNEIVMKLVIMIMWYSPLGIACLICGKIIAIKDLEVVARQLGMYMVTVIIGLIIHGGIFLPLIYFVVTRKNPFSFFAGIFQAWITALGTASSAGTLPVTFRCLEENLGIDKRVTRFVLPVGATINMDGTALYEAVAAIFIAQMNGVVLDGGQIVTVSLTATLASVGAASIPSAGLVTMLLILTAVGLPTEDISLLVAVDWLLDRMRTSVNVVGDSFGAGIVYHLSKSELDTIDSQHRVHEDIEMTKTQSIYDDMKNHRESNSNQCVYAAHNSVIVDECKSLHYVEYQSWV

SEQ ID NO: 68504 - protein, 442 aa, Homo sapiens
MSTTIIAAVLGVILVLAIHPGNPKLKKQLGPGKKNDEVSSLDAFLDLIRNLFPENLVQACFQQIQTVTKKVLVAPPPDEEANATSAVVSLLNETVTEVPEETKMVIKKGLEFKDGMNVLGLIGFFIAFGIAMGKMGDQAKLMVDFFNILNEIVMKLVIMIMWYSPLGIACLICGKIIAIKDLEVVARQLGMYMVTVIIGLIIHGGIFLPLIYFVVTRKNPFSFFAGIFQAWITALGTASSAGTLPVTFRCLEENLGIDKRVTRFVLPVGATINMDGTALYEAVAAIFIAQMNGVVLDGGQIVTVSLTATLASVGAASIPSAGLVTMLLILTAVGLPTEDISLLVAVDWLLDRMRTSVNVVGDSFGAGIVYHLSKSELDTIDSQHRVHEDIEMTKTQSIYDDMKNHRESNSNQCVYAAHNSVIVDECKHVVCGHDACISLPLG

SEQ ID NO: 68505 - protein, 439 aa, Homo sapiens
MSTTIIAAVLGVILVLAIHPGNPKLKKQLGPGKKNDEVSSLDAFLDLIRNLFPENLVQACFQQIQTVTKKVLVAPPPDEEANATSAVVSLLNETVTEVPEETKMVIKKGLEFKDGMNVLGLIGFFIAFGIAMGKMGDQAKLMVDFFNILNEIVMKLVIMIMWYSPLGIACLICGKIIAIKDLEVVARQLGMYMVTVIIGLIIHGGIFLPLIYFVVTRKNPFSFFAGIFQAWITALGTASSAGTLPVTFRCLEENLGIDKRVTRFVLPVGATINMDGTALYEAVAAIFIAQMNGVVLDGGQIVTVSLTATLASVGAASIPSAGLVTMLLILTAVGLPTEDISLLVAVDWLLDRMRTSVNVVGDSFGAGIVYHLSKSELDTIDSQHRVHEDIEMTKTQSIYDDMKNHRESNSNQCVYAAHNSVIVDECKVHFPFMDIETCI

SEQ ID NO: 68506 - protein, 67 aa, Homo sapiens
MGRPRPRAAKTWMFLLLLGGAWAGNTQYAWETTAYRIKMAQSKKYLWFSPSHTPATTAAMWRTTTMI

SEQ ID NO: 68507 - protein, 29 aa, Homo sapiens
MCGVAGTLLIAVDAAVTSFTPAPMACMIH

SEQ ID NO: 68508 - protein, 113 aa, Homo sapiens
MGTFLSVSQTVLAQLDALLVFPGQVAQLSCTLSPQHVTIRDYGVSWYQQRAGSAPRYLLYYRSEEDHHRPADIPDRFSAAKDEAHNACVLTISPVQPEDDADYYCSVGYGFSP

SEQ ID NO: 68509 - protein, 29 aa, Homo sapiens
MGICVFLYYCWLRTQSFEACPDAGPGTRV

SEQ ID NO: 68510 - protein, 40 aa, Homo sapiens
MLAILSIGDALILSFLAFVLGYRQDKLLPDDYKADGTEEV

SEQ ID NO: 68511 - protein, 109 aa, Homo sapiens
LELVICFFSIWSILGLSGFHTYLVASNLTTNEDIKGSWSSKRGGEASVNPYSHKSIITNCCAVLCGPLPPSLIDRRGFVQSDTVLPSPIRSDEPACRAKPDASMVGGHP

SEQ ID NO: 68512 - protein, 45 aa, Homo sapiens
KEVPSGTPFMAILMLHLLHFSEGPTPLKFSLEDEWVVVEILKKWK

SEQ ID NO: 68513 - protein, 516 aa, Homo sapiens
LLWALGLLGAGSPLPSWPLPNIGGTEEQQAESEKAPREPLEPQVLQDDLPISLKKVLQTSLPEPLRIKLELDGDSHILELLQNRELVPGLNFSNCSRRALEKALLDGMGSCLFERLPSLPPMAAFCGNMFVEPGEQCDCGFLDDCVDPCCDSLTCQLRPGAQCASDGPCCQNCQLRPSGWQCRPTRGDCDLPEFCPGDSSQCPPDVSLGDGEPCAGGQAVCMHGRCASYAQQCQSLWGPGAQPAAPLCLQTANTRGNAFGSCGRNPSGSYVSCTPRDAICGQLQCQTGRTQPLLGSIRDLLWETIDVNGTELNCSWVHLDLGSDVAQPLLTLPGTACGPGLVCIDHRCQRVDLLGAQECRSKCHGHGVCDSNRHCYCEEGWAPPDCTTQLKATSSLTTGLLLSLLVLLVLVMLGASYWYRARLHQRLCQLKGPTCQYRAAQSGPSERPGPPQRALLARGTKSQGPAKPPPPRKPLPADPQGRCPSGDLPGPGAGIPPLVVPSRPAPPPPTVSSLYL

SEQ ID NO: 68514 - protein, 26 aa, Homo sapiens
LCYLSLYALQNLFTLLFWKRIPEAKP

SEQ ID NO: 68515 - protein, 41 aa, Homo sapiens
TLWLSGLLSFSAFSGRRPAASGRGDRTVCQRRDGAWTPGIL

SEQ ID NO: 68516 - protein, 708 aa, Homo sapiens
VAGGSVRSEGAMAVRALKLLTTLLAVVAAASQAEVESEAGWGMVTPDLLFAEGTAAYARGDWPGVVLSMERALRSRAALRALRLRCRTQCAADFPWELDPDWSPSPAQASGAAALRDLSFFGGLLRRAACLRRCLGPPAAHSLSEEMELEFRKRSPYNYLQVAYFKINKLEKAVAAAHTFFVGNPEHMEMQQNLDYYQTMSGVKEADFKDLETQPHMQEFRLGVRLYSEEQPQEAVPHLEAALQEYFVAYEECRALCEGPYDYDGYNYLEYNADLFQAITDHYIQVLNCKQNCVTELASHPSREKPFEDFLPSHYNYLQFAYYNIGNYTQAVECAKTYLLFFPNDEVMNQNLAYYAAMLGEEHTRSIGPRESAKEYRQRSLLEKELLFFAYDVFGIPFVDPDSWTPEEVIPKRLQEKQKSERETAVRISQEIGNLMKEIETLVEEKTKESLDVSRLTREGGPLLYEGISLTMNSKLLNGSQRVVMDGVISDHECQELQRLTNVAATSGDGYRGQTSPHTPNEKFYGVTVFKALKLGQEGKVPLQSAHLYYNVTEKVRRIMESYFRLDTPLYFSYSHLVCRTAIEEVQAERKDDSHPVHVDNCILNAETLVCVKEPPAYTFRDYSAILYLNGDFDGGNFYFTELDAKTVTAEVQPQCGRAVGFSSGTENPHGVKAVTRGQRCAIALWFTLDPRHSERVRAARAGQGAGR

SEQ ID NO: 68517 - protein, 675 aa, Homo sapiens
KKLVYLYMCTYAPLKPDLALLAINTLCKDCSDPNPMVRGLALRSMCSLRMPGVQEYIQQPILNGLRDKASYVRRVAVLGCAKMHNLHGDSEVDGALVNELYSLLRDQDPIVVVNCLRSLEEILKQEGGVVINKPIAHHLLNRMSKLDQWGQAEVLNFLLRYQPRSEEELFDILNLLDSFLKSSSPGVVMGATKLFLILAKMFPHVQTDVLVRVKGPLLAACSSESRELCFVALCHVRQILHSLPGHFSSHYKKFFCSYSEPHYIKLQKVEVLCELVNDENVQQVLEELRGYCTDVSADFAQAAIFAIGGIARTYTDQCVQILTELLGLRQEHITTVVVQTFRDLVWLCPQCTEAVCQALPGCEENIQDSEGKQALIWLLGVHGERIPNAPYVLEDFVENVKSETFPAVKMELLTALLRLFLSRPAECQDMLGRLLYYCIEEEKDMAVRDRGLFYYRLLLVGIDEVKRILCSPKSDPTLGLLEDPAERPVNSWASDFNTLVPVYGKAHWATISKCQGAERCDPELPKTSSFAASGPLIPEENKERVQELPDSGALMLVPNRQLTADYFEKTWLSLKVAHQQVLPWRGEFHPDTLQMALQVVNIQTIAMSRAGSRPWKAYLSAQDDTGCLFLTELLLEPGNSEMQISVKQNEARTETLNSFISVLETVIGTIEEIKS

SEQ ID NO: 68518 - protein, 51 aa, Homo sapiens
IAASGFLFSTNRIWSLVLHLLSVARIPPSPLASPLLGSSPVGIHVSSLTPP

SEQ ID NO: 68519 - protein, 457 aa, Homo sapiens
IFAVTFLLALVGAVLYLYPASRQAAGIPGITPTEEKDGNLPDIVNSGSLHEFLVNLHERYGPVVSFWFGRRLVVSLGTVDVLKQHINPNKTSDPFETMLKSLLRYQSGGGSVSENHMRKKLYENGVTDSLKSNFALLLKLSEELLDKWLSYPETQHVPLSQHMLGFAMKSVTQMVMGSTFEDDQEVIRFQKNHGTVWSEIGKGFLDGSLDKNMTRKKQYEDALMQLESVLRNIIKERKGRNFSQHIFIDSLVQGNLNDQQILEDSMIFSLASCIITAKLCTWAICFLTTSEEVQKKLYEEINQVFGNGPVTPEKIEQLRYCQHVLCETVRTAKLTPVSAQLQDIEGKIDRFIIPRETLVLYALGVVLQDPNTWPSPHKFDPDRFDDELVMKTFSSLGFSGTQECPELRFAYMVTTVLLSVLVKRLHLLSVEGQVIETKYELVTSSREEAWITVSKRY

SEQ ID NO: 68520 - protein, 792 aa, Homo sapiens
LAVVVLSLALGMSGRWVLAWYRARRAVTLHSAPPVLPADSSSPAVAPDLFWGTYRPHVYFGMKTRSPKPLLTGLMWAQQGTTPGTPKLRHTCEQGDGVGPYGWEFHDGLSFGRQHIQDGALRLTTEFVKRPGGQHGGDWSWRVTVEPQDSGTSALPLVSLFFYVVTDGKEVLLPEVGAKGQLKFISGHTSELGDFRFTLLPPTSPGDTAPKYGSYNVFWTSNPGLPLLTEMVKSRLNSWFQHRPPGAPPERYLGLPGSLKWEDRGPSGQGQGQFLIQQVTLKIPISIEFVFESGSAQAGGNQALPRLAGSLLTQALESHAEGFRERFEKTFQLKEKGLSSGEQVLGQAALSGLLGGIGYFYGQGLVLPDIGVEGSEQKVDPALFPPVPLFTAVPSRSFFPRGFLWDEGFHQLVVQRWDPSLTREALGHWLGLLNADGWIGREQILGDEARARVPPEFLVQRAVHANPPTLLLPVAHMLEVGDPDDLAFLRKALPRLHAWFSWLHQSQAGPLPLSYRWRGRDPALPTLLNPKTLPSGLDDYPRASHPSVTERHLDLRCWVALGARVLTRLAEHLGEAEVAAELGPLAASLEAAESLDELHWAPELGVFADFGNHTKAVQLKPRPPQGLVRVVGRPQPQLQYVDALGYVSLFPLLLRLLDPTSSRLGPLLDILADSRHLWSPFGLRSLAASSSFYGQRNSEHDPPYWRGAVWLNVNYLALGALHHYGHLEGPHQARAAKLHGELRANVVGNVWRQYQATGFLWEQYSDRDGRGMGCRPFHGWTSLVLLAMAEDY

SEQ ID NO: 68521 - protein, 584 aa, Homo sapiens
ILLPFMLLSQGLGVLRVAWDSRACSPALRALLRKLGGLFLPPEASLSLDSSEGLLARAVVQAVIEQLLVSGQPLLIFLEEPPGALGPRLSALGQAWVGFVVQAVQVGIVPDALLVPVAVTYDLVPDAPCDIDHASAPLGLWTGALAVLRSLWSRWGCSHRICSRVHLAQPFSLQEYIVSARSCWGGRQTLEQLLQPIVLGQCTAVPDTEKEQEWTPITGPLLALKEEDQLLVRRLSCHVLSASVGSSAVMSTAIMATLLLFKHQKLLGEFSWLTEEILLRGFDVGFSGQLRSLLQHSLSLLRAHVALLRIRQGDLLVVPQPGPGLTHLAQLSAELLPVFLSEAVGACAVRGLLAGRVPPQGPWELQGILLLSQNELYRQILLLMHLLPQDLLLLKPCQSSYCYCQEVLDRLIQCGLLVAEETPGSRPACDTGRQRLSRKLLWKPSGDFTDSDSDDFGEADGRYFRLSQQSHCPDFFLFLCRLLSPLLKAFAQAAAFLRQGQLPDTELGYTEQLFQFLQATAQEEGIFECADPKLAISAVWTFRDLGVLQQTPSPAGPRLHLSPTFASLDNQEKLEQFIRQFICS

SEQ ID NO: 68522 - protein, 614 aa, Homo sapiens
IPEGLPIVVTVTLALGVMRMVKKRAIVKKLPIVETLGCCNVICSDKTGTLTKNEMTVTHIFTSDGLHAEVTGVGYNQFGEVIVDGDVVHGFYNPAVSRIVEAGCVCNDAVIRNNTLMGKPTEGALIALAMKMGLDGLQQDYIRKAEYPFSSEQKWMAVKCVHRTQQDRPEICFMKGAYEQVIKYCTTYQSKGQTLTLTQQQRDVYQQEKARMGSAGLRVLALASGPELGQLTFLGLVGIIDPPRTGVKEAVTTLIASGVSIKMITGDSQETAVAIASRLGLYSKTSQSVSGEEIDAMDVQQLSQIVPKVAVFYRASPRHKMKIIKSLQKNGSVVAMTGDGVNDAVALKAADIGVAMGQTGTDVCKEAADMILVDDDFQTIMSAIEEGKGIYNNIKNFVRFQLSTSIAALTLISLATLMNFPNPLNAMQILWINIIMDGPPAQSLGVEPVDKDVIRKPPRNWKDSILTKNLILKILVSSIIIVCGTLFVFWRELRDNVITPRDTTMTFTCFVFFDMFNALSSRSQTKSVFEIGLCSNRMFCYAVLGSIMGQLLVIYFPPLQKVFQTESLSILDLLFLLGLTSSVCIVAEIIKKVERSREKIQKHVSSTSSSFLEV

SEQ ID NO: 68523 - protein, 754 aa, Homo sapiens
LRRRRWAALLVLGLLVAGAADGCELVPRHLRGRRATGSAATAASSPAAAAGDSPALMTDPCMSLSPPCFTEEDRFSLEALQTIHKQMDDDKDGGIEVEESDEFIREDMKYKDATNKHSHLHREDKHITIEDLWKRWKTSEVHNWTLEDTLQWLIEFVELPQYEKNFRDNNVKGTTLPRIAVHEPSFMISQLKISDRSHRQKLQLKALDVVLFGPLTRPPHNWMKDFILTVSIVIGVGGCWFAYTQNKTSKEHVAKMMKDLESLQTAEQSLMDLQERLEKAQEENRNVAVEKQNLERKMMDEINYAKEEACRLRELREGAECELSRRQYAEQELEQVRMALKKAEKEFELRSSWSVPDALQKWLQLTHEVEVQYYNIKRQNAEMQLAIAKDEAEKIKKKRSTVFGTLHVAHSSSLDEVDHKILEAKKALSELTTCLRERLFRWQQIEKICGFQIAHNSGLPSLTSSLYSDHSWVVMPRVSIPPYPIAGGVDDLDEDTPPIVSQFPGTMAKPPGSLARSSSLCRSRRSIVPSSPQPQRAQLAPHAPHPSHPRHPHHPQHTPHSLPSPDPDILSVSSCPALYRNEEEEEAIYFSAEKQWEVPDTASECDSLNSSIGRKQSPPLSLEIYQTLSPRKISRDEVSLEDSSRGDSPVTVDVSWGSPDCVGLTETKSMIFSPASKVYNGILEKSCSMNQLSSGIPVPKPRHTSCSSAGNDSKPVQEAPSVARISSIPHDLCHNGEKSKKPSKIKSLFKKKSK

SEQ ID NO: 68524 - protein, 345 aa, Homo sapiens
LAGALFVWLLRGGPGDTGKDGDAEQEKDAPLGGAAIPGGHQSGSSGLSPGPSGQELVTKPEHLQESNGHLISKTKDLGKLQAASWRLQNPSREVCDNSREHVPSGQFPDTEAPATSETSNSRSYSEVSRNESLESPMGEWGFQKGQEISAKAATCFAEKLPSSNLLKNRAKEEMSLSDLNSQDRVDHEEWEMVPRHSSWGDVGVGGSLKAPVLNLNQGMDNGRSTLVEARGQQVHGKMERVAVMPAGSQQVSVRFQVHYVTSTDVQFIAVTGDHECLGRWNTYIPLHYNKDGFWSHSIFLPADTVVEWKFVLVENGGVTRWEECSNRFLETGHEDKVVHAWWGIH

SEQ ID NO: 68525 - protein, 290 aa, Homo sapiens
IIVKHVTVIGGGLMGAGIAQVAAATGHTVVLVDQTEDILAKSKKGIEESLRKVAKKKFAENLKAGDEFVEKTLSTIATSTDAASVVHSTDLVVEAIVENLKVKNELFKRLDKFAAEHTIFASNTSSLQITSIANATTRQDRFAGLHFFNPVPVMKLVEVIKTPMTSQKTFESLVDFSKALGKHPVSCKDTPGFIVNRLLVPYLMEAIRLYERGDASKEDIDTAMKLGAGYPMGPFELLDYVGLDTTKFIVDGWHEMDAENPLHQPSPSLNKLVAENKFGKKTGEGFYKYK

SEQ ID NO: 68526 - protein, 187 aa, Homo sapiens
LLSRPALTLLLLLMAAVVRCQEQAQTTDWRATLKTIRNGVHKIDTYLNAALDLLGGEDGLCQYKCSDGSKPFPRYGYKPSPPNGCGSPLFGVHLNIGIPSLTKCCNQHDRCYETCGKSKNDCDEEFQYCLSKICRDVQKTLGLTQHVQACETTVELLFDSVIHLGCKPYLDSQRAACRCHYEEKTDL

SEQ ID NO: 68527 - protein, 68 aa, Homo sapiens
ILSPVLWRCFSTVVIFLFLLDEQTSLLVLVPAGVGAAIELWKVKKALKMTIFWRGLMPEFQVGFSCNG

SEQ ID NO: 68528 - protein, 81 aa, Homo sapiens
LADYAFTSYSPSLLAICCLALADRMLRVSRPVDLRLGDHPEAALEDCMGKLQLLVAINSTSLTHMLPVQICEKCSLPPSSK

SEQ ID NO: 68529 - protein, 456 aa, Homo sapiens
LPSSRMAPLGMLLGLLMAACFTFCLSHQNLKEFALTNPEKSSTKETERKETKAEEELDAEVLEVFHPTHEWQALQPGQAVPAGSHVRLNLQTGEREAKLQYEDKFRNNLKGKRLDINTNTYTSQDLKSALAKFKEGAEMESSKEDKARQAEVKRLFRPIEELKKDFDELNVVIETDMQIMVRLINKFNSSSSSLEEKIAALFDLEYYVHQMDNAQDLLSFGGLQVVINGLNSTEPLVKEYAAFVLGAAFSSNPKVQVEAIEGGALQKLLVILATEQPLTAKKKVLFALCSLLRHFPYAQRQFLKLGGLQVLRTLVQEKGTEVLAVRVVTLLYDLVTEKMFAEEEAELTQEMSPEKLQQYRQVHLLPGLWEQGWCEITAHLLALPEHDAREKVLQTLGVLLTTCRDRYRQDPQLGRTLASLQAEYQVLASLELQDGEDEGYFQELLGSVNSLLKELR

SEQ ID NO: 68530 - protein, 113 aa, Homo sapiens
MAPRTLLLLLSGALALTQTWAGSHSMRYFFTSVSRPGRGEPRFIAVGYVDDTQFVRFDSDAASQRMEPRAPWIEQEGPEYWDQETRNVKAQSQTDRVDLGTLRGYYNQSEAGE

SEQ ID NO: 68531 - protein, 11 aa, Homo sapiens
VVFLVTHLWSF

SEQ ID NO: 68532 - protein, 31 aa, Homo sapiens
LLFPRLSLLVCEQFWCYSATLLLAPLPASTC

SEQ ID NO: 68533 - protein, 343 aa, Homo sapiens
RPALLLLMLLQTAVLQGRLLRSHSLHYLFMGASEQDLGLSLFEALGYVDDQLFVFYDHESRRVEPRTPWVSSRISSQMWLQLSQSLKGWDHMFTVDFWTIMENHNHSKESHTLQVILGCEMQEDNSTEGYWKYGYDGQDHLEFCPDTLDWRAAEPRAWPTKLEWERHKIRARQNRAYLERDCPAQLQQLLELGRGVLDQQVPPLVKVTHHVTSSVTTLRCRALNYYPQNITMKWLKDKQPMDAKEFEPKDVLPNGDGTYQGWITLAVPPGEEQRYTCQVEHPGLDQPLIVIWEPSPSGTLVIGVISGIAVFVVILFIGILFIILRKRQGSRGAMGHYVLAERE

SEQ ID NO: 68534 - protein, 236 aa, Homo sapiens
LCLPLLFLLFGWSRARRDDPHSLCYDITVIPKFRPGPRWCAVQGQVDEKTFLHYDCGNKTVTPVSPLGKKLNVTMAWKAQNPVLREVVDILTEQLLDIQLENYTPKEPLTLQARMSCEQKAEGHSSGSWQFSIDGQTFLLFDSEKRMWTTVHPGARKMKEKWENDKDVAMSFHYISMGDCIGWLEDFLMGMDSTLEPSAGAPLAMSSGTTQLRATATTLILCCLLIILPCFILPGI

SEQ ID NO: 68535 - protein, 44 aa, Homo sapiens
IAFNCMVLGTLFIGGSLVAGQQLTGGDLMSFLVASQTVQRWSGG

SEQ ID NO: 68536 - protein, 129 aa, Homo sapiens
LFVASAASQLLVHVLALSMRGGAEGQPCLPGGDWPACAQKIMDHVEESLCSAATPKVTQALNVLTTTFGRCQSPWTEALWVRLSPRVACLLERDPIPAAHSFVDLLLCVARSGPRDAAGGPGWATVFLG

SEQ ID NO: 68537 - protein, 29 aa, Homo sapiens
VVVSLTLTAVILVLTRRCRTASHPVSASE

SEQ ID NO: 68538 - protein, 17 aa, Homo sapiens
VIIMDTVLTVILLGRFP

SEQ ID NO: 68539 - protein, 354 aa, Homo sapiens
LDPKILKFVVFIVAVLLPVRVDSATIPRQDEVPQQTVAPQQQRRSLKEEECPAGSHRSEYTGACNPCTEGVDYTIASNNLPSCLLCTVCKSGQTNKSSCTTTRDTVCQCEKGSFQDKNSPEMCRTCRTGCPRGMVKVSNCTPRSDIKCKNESAASSTGKTPAAEETVTTILGMLASPYHYLIIIVVLVIILAVVVVGFSCRKKFISYLKGICSGGGGGPERVHRVLFRRRSCPSRVPGAEDNARNETLSNRYLQPTQVSEQEIQGQELAELTGVTVELPEEPQRLLEQAEAEGCQRRRLLVPVNDADSADISTLLDASATLEEGHAKETIQDQLVGSEKLFYEEDEAGSATSCL

SEQ ID NO: 68540 - protein, 12 aa, Homo sapiens
MRKRLLWELLML

SEQ ID NO: 68541 - protein, 18 aa, Homo sapiens
TPLLLLGLLFVLLDRSGR

SEQ ID NO: 68542 - protein, 42 aa, Homo sapiens
LLFVYFLLLPRRRRRHHEGNRALAGRAVRQPNRRQVLGGDQR

SEQ ID NO: 68543 - protein, 137 aa, Homo sapiens
LAFCVAGAAALSVASLCWCRLQREIRLTQKADYATAKAPGSPAAPRISPGDQRLAQSAEMYHYQHQRQQMLCLERHKEPPKELDTASSDEENEDGDFTVYECPGLAPTGEMEVRNPLFDHAALSAPLPAPSSPPALP

SEQ ID NO: 68544 - protein, 48 aa, Homo sapiens
LLVLVPITCALLQLFTWSQFTLHGRRLHMVKAQRQNLSQAQTLDVKMV

SEQ ID NO: 68545 - protein, 154 aa, Homo sapiens
LGTFTGYSALALALALPADGRVVTCEVDAQPPELGRPLWRQAEAEHKIDLRLKPALETLDELLAAGEAGTFDVAVVDADKENCSAYYERCLQLLRPGGILAVLRVLWRGKVLQPPKGDVAAECVRNLNERIRRDVRVYISLLPLGDGLTLAFKI

SEQ ID NO: 68546 - protein, 24 aa, Homo sapiens
LLLAQGVAAAVLLVQVVMGEELGE

SEQ ID NO: 68547 - protein, 1147 aa, Homo sapiens
LASAVLGSFLTLLAQFFLLYRRQPEPPADEAARAGEGFRYIKPVPGLLLREYLYGGGRDEEPSGAAPEGGATPTAAPETPAPPTRETCYFLNATILFLFRELRDTALTRRWVTKKIKVEFEELLQTKTAGRLLEGLSLRDVFLGETVPFIKTIRLVRPVVPSATGEPDGPEGEALPAACPEELAFEAEVEYNGGFHLAIDVDLVFGKSAYLFVKLSRVVGRLRLVFTRVPFTHWFFSFVEDPLIDFEVRSQFEGRPMPQLTSIIVNQLKKIIKRKHTLPNYKIRFKPFFPYQTLQGFEEDEEHIHIQQWALTEGRLKVTLLECSRLLIFGSYDREANVHCTLELSSSVWEEKQRSSIKTVELIKGNLQSVGLTLRLVQSTDGYAGHVIIETVAPNSPAAIADLQRGDRLIAIGGVKITSTLQVLKLIKQAGDRVLVYYERPVGQSNQGAVLQDNFGQLEENFLSSSCQSGYEEEAAGLTVDTESRELDSEFEDLASDVRAQNEFKDEAQSLSHSPKRVPTTLSIKPLGAISPVLNRKLAVGSHPLPPKIQSKDGNKPPPLKTSEITDPAQVSKPTQGSAFKPPVPPRPQAKVPLPSADAPNQAEPDVLVEKPEKVVPPPLVDKSAEKQAKNVDAIDDAAAPKQFLAKQEVAKDVTSETSCPTKDSSDDRQTWESSEILYRNKLGKWTRTRASCLFDIEACHRYLNIALWCRDPFKLGGLICLGHVSLKLEDVALGCLATSNTEYLSKLRLEAPSPKAIVTRTALRNLSMQKGFNDKFCYGDITIHFKYLKEGESDHHVVTNVEKEKEPHLVEEVSVLPKEEQFVGQMGLTENKHSFQDTQFQNPTWCDYCKKKVWTKAASQCMFCAYVCHKKCQEKCLAETSVCGATDRRIDRTLKNLRLEGQETLLGLPPRVDAEASKSVNKTTGLTRHIINTSSRLLNLRQVSKTRLSEPGTDLVEPSPKHTPNTSDNEGSDTEVCGPNSPSKRGNSTGIKLVRKEGGLDDSVFIAVKEIGRDLYRGLPTEERIQKLEFMLDKLQNEIDQELEHNNSLVREEKETTDTRKKSLLSAALAKSGERLQALTLLMIHYRAGIEDIETLESLSLDQHSKKISKYTDDTEEDLDNEISQLIDSQPFSSISDDLFGPSESV

SEQ ID NO: 68548 - protein, 667 aa, Homo sapiens
IYNAIMFLFVLANFSMATFMDPGIFPRAEEDEDKEDDFRAPLYKTVEIKGIQVRMKWCATCRFYRPPRCSHCSVCDNCVEEFDHHCPWVNNCIGRRNYRYFFLFLLSLTAHIMGVFGFGLLYVLYHIEELSGVRTAVTMAVMCVAGLFFIPVAGLTGFHVVLVARGRTTNEQVTGKFRGGVNPFTNGCCNNVSRVLCSSPAPRYLGRPKKEKTIVIRPPFLRPEVSDGQITVKIMDNGIQGELRRTKSKGSLEITESQSADAEPPPPPKPDLSRYTGLRTHLGLATNEDSSLLAKDSPPTPTMYKYRPGYSSSSTSAAMPHSSSAKLSRGDSLKEPTSIAESSRHPSYRSEPSLEPESFRSPTFGKSFHFDPLSSGSRSSSLKSAQGTGFELGQLQSIRSEGTTSTSYKSLANQTRNGSLSYDSLLTPSDSPDFESVQAGPEPDPPLGYTSPFLSARLAQQREAERHPRLVPTGPTHREPSPVRYDNLSRHIVASLQEREKLLRQSPPLPGREEEPGLGDSGIQSTPGSGHAPRTSSSSDDSKRSPLGKTPLGRPAVPRFGKPDGLRGRGVGSPEPGPTAPYLGRSMSYSSQKAQPGVSETEEVALQPLLTPKDEVQLKTTYSKSNGQPKSLGSASPGPGQPPLSSPTRGGVKKVSGVGGTTYEISV

SEQ ID NO: 68549 - protein, 291 aa, Homo sapiens
ITVTGVTVLVLVLKSMNSRRREPITLQDPEAKYPLPLIEKEKISHNTRRFRFGLPSPDHVLGLPVGNYVQLLAKIDNELVVRAYTPVSSDDDRGFVDLIIKIYFKNVHPQYPEGGKMTQYLENMKIGETIFFRGPRGRLFYHGPGNLGIRPDQTSEPKKTLADHLGMIAGGTGITPMLQLIRHITKDPSDRTRMSLIFANQTEEDILVRKELEEIARTHPDQFNLWYTLDRPPIGWKYSSGFVTADMIKEHLPPPAKSTLILVCGPPPLIQTAAHPNLEKLGYTQDMIFTY

SEQ ID NO: 68550 - protein, 41 aa, Homo sapiens
LLAALLLLLSGDGAVRCDTPANCTYLDLLGTWVFQDHKKKK

SEQ ID NO: 68551 - protein, 223 aa, Homo sapiens
KMKLPLLLALLFGAVSALHLRSETSTFETPLGAKTLPEDEETPEQEMEETPCRELEEEEEWGSGSEDASKKDGAVESISVPDMVDKNLTCPEEEDTVKVVGIPGCQTCRYLLVRSLQTFSQAWFTCRRCYRGNLVSIHNFNINYRIQCSVSALNQGQVWIGGRITGSGRCRRFQWVDGSRWNFAYWAAHQPWSRGGHCVALCTRGGHWRRAHCLRRLPFICSY

SEQ ID NO: 68552 - protein, 48 aa, Homo sapiens
IILFCFIPFPFLNCFVKEQCKAFPHHEESCTMSTWGCWQCSVPMPSIS

SEQ ID NO: 68553 - protein, 41 aa, Homo sapiens
IPVGCDLLLLAMVVRPPQLCGTIDEEPTKKSLRIQHTLSQT

SEQ ID NO: 68554 - protein, 251 aa, Homo sapiens
LEGEDGAQTLTMTPHRLLPPLLLLLALLLAASPGGALARCPGCGQGVQAGCPGGCVEEEDGGSPAEGCAEAEGCLRREGQECGVYTPNCAPGLQCHPPKDDEAPLRALLLGRGRCLPARAPAVAEENPKESKPQAGTARPQDVNRRDQQRNPGTSTTPSQPNSAGVQDTEMGPCRRHLDSVLQQLQTEVYRGAQTLYVPNCDHRGFYRKRQCRSSQGQRRGPCWCVDRMGKSLPGSPDGNGSSSCPTGSSG

SEQ ID NO: 68555 - protein, 87 aa, Homo sapiens
IFGLLLLVLFILFLTWCRVQKQKHLPLRVSTRRRGSLEENLFHEMETCLKREDPHGTRTSDDTPNHGCEDASDTSLLGVLPASEATK

SEQ ID NO: 68556 - protein, 201 aa, Homo sapiens
LISLGKVVLALACNSLAGIQRENLQKAMELVTINYSSDLKNLILYLLTDQNRMRSVNDIMPMIGARFYTQLDAAQMRNDVIEEDLAKEVQNGRLFRLLAKLGTINERPEFQKDPTWSETGDRYLLKLFRDHLFHQVTEAGAPWIDLSHIISCLNKLDAGVPEKISLISRDEKSVLVVTYSDLKRCFENTFQELIAAANGQL

SEQ ID NO: 68557 - protein, 79 aa, Homo sapiens
LVIVLWGIRLLLQRKKKLVSTSKNGKNQMVIAFFHPYCNAGGGGERVLWCALRALQKKSCGVYGSWHNYPCTQFGGPKA

SEQ ID NO: 68558 - protein, 25 aa, Homo sapiens
KKMERPLFTLWLSICSLLCLYGPIG

SEQ ID NO: 68559 - protein, 36 aa, Homo sapiens
LLLLLVLAVGLAVFFFRRHGTPRRLLYCQRSLLDKV

SEQ ID NO: 68560 - protein, 403 aa, Homo sapiens
IFGYFILGTVVNKTLMGPIVMKLVHQEKLEGDFRFKHMQIRVNAEPAAFYRAGHVEHMRTDRRLQRLLQTQRELMSKELWLYIGINTFDYLGSILSYVVIAIPIFSGVYGDLSPAELSTLVSKNAFVCIYLISCFTQLIDLSTTLSDVAGYTHRIGQLRETLLDMSLKSQDCEILGESEWGLDTPPGWPAAEPADTAFLLERVSISAPSSDKPLIKDLSLKISEGQSLLITGNTGTGKTSLLRVLGGLWTSTRGSVQMLTDFGPHGVLFLPQKPFFTDGTLREQVIYPLKEVYPDSGSADDERILRFLELAGLSNLVARTEGLDQQVDWNWYDVLSPGEMQRLSFARLFYLQPKYAVLDEATSALTEEVESELYRIGQQLGMTFISVGHRQSLEKVPVLTRMA

SEQ ID NO: 68561 - protein, 417 aa, Homo sapiens
IFGYFILGTVVNKTLMGPIVMKLVHQEKLEGDFRFKHMQIRVNAEPAAFYRAGHVEHMRTDRRLQRLLQTQRELMSKELWLYIGINTFDYLGSILSYVVIAIPIFSGVYGDLSPAELSTLVSKNAFVCIYLISCFTQLIDLSTTLSDVAGYTHRIGQLRETLLDMSLKSQDCEILGESEWGLDTPPGWPAAEPADTAFLLERVSISAPSSDKPLIKDLSLKISEGQSLLITGNTGTGKTSLLRVLGGLWTSTRGSVQMLTDFGPHGVLFLPQKPFFTDGTLREQVIYPLKEVYPDSGSADDERILRFLELAGLSNLVARTEGLDQQVDWNWYDVLSPGEMQRLSFARLFYLQPKYAVLDEATSALTEEVESELYRIGQQLGMTFISVGHRQSLEKFHSLVLKLCGGGRWELMRIKVE

SEQ ID NO: 68562 - protein, 42 aa, Homo sapiens
LLLGTAYSFYLFHPLAYGMVGPLAQDPQSPMAGLRWLDSWDF

SEQ ID NO: 68563 - protein, 290 aa, Homo sapiens
LLGLLLGRMSGSSLPSALALSLLLVSGSLLPGPGAAQNEPRIVTSEEVIIRDSPVLPVTLQCNLTSSSHTLTYSYWTKNGVELSATRKNASNMEYRINKPRAEDSGEYHCVYHFVSAPKANATIEVKAAPDITGHKRSENKNEGQDATMYCKSVGYPHPDWIWRKKENGMPMDIVNTSGRFFIINKENYTELNIVNLQITEDPGEYECNATNAIGSASVVTVLRVRSHLAPLWPFLGILAEIIILVVIIVVYEKRKRPDEVPDDDEPAGPMKTNSTNNHKDKNLRQRNTN

SEQ ID NO: 68564 - protein, 40 aa, Homo sapiens
KKNIWLLSGSRQQYLIALWRLLLLEIYISEGTHSTEEDSK

SEQ ID NO: 68565 - protein, 1167 aa, Homo sapiens
RTRAALLLFTALATSLGFNLDTEELTAFRVDSAGFGDSVVQYANSWVVVGAPQKITAANQTGGLYQCGYSTGACEPIGLQVPPEAVNMSLGLSLASTTSPSQLLACGPTVHHECGRNMYLTGLCFLLGPTQLTQRLPVSRQECPRQEQDIVFLIDGSGSISSRNFATMMNFVRAVISQFQRPSTQFSLMQFSNKFQTHFTFEEFRRSSNPLSLLASVHQLQGFTYTATAIQNVVHRLFHASYGARRDAAKILIVITDGKKEGDSLDYKDVIPMADAAGIIRYAIGVGLAFQNRNSWKELNDIASKPSQEHIFKVEDFDALKDIQNQLKEKIFAIEGTETTSSSSFELEMAQEGFSAVFTPDGPVLGAVGSFTWSGGAFLYPPNMSPTFINMSQENVDMRDSYLGYSTELALWKGVQSLVLGAPRYQHTGKAVIFTQVSRQWRMKAEVTGTQIGSYFGASLCSVDVDSDGSTDLVLIGAPHYYEQTRGGQVSVCPLPRGWRRWWCDAVLYGEQGHPWGRFGAALTVLGDVNGDKLTDVVIGAPGEEENRGAVYLFHGVLGPSISPSHSQRIAGSQLSSRLQYFGQALSGGQDLTQDGLVDLAVGARGQVLLLRTRPVLWVGVSMQFIPAEIPRSAFECREQVVSEQTLVQSNICLYIDKRSKNLLGSRDLQSSVTLDLALDPGRLSPRATFQETKNRSLSRVRVLGLKAHCENFNLLLPSCVEDSVTPITLRLNFTLVGKPLLAFRNLRPMLAADAQRYFTASLPFEKNCGADHICQDNLGISFSFPGLKSLLVGSNLELNAEVMVWNDGEDSYGTTITFSHPAGLSYRYVAEGQKQGQLRSLHLTCDSAPVGSQGTWSTSCRINHLIFRGGAQITFLATFDVSPKAVLGDRLLLTANVSSENNTPRTSKTTFQLELPVKYAVYTVVSSHEQFTKYLNFSESEEKESHVAMHRYQVNNLGQRDLPVSINFWVPVELNQEAVWMDVEVSHPQNPSLRCSSEKIAPPASDFLAHIQKNPVLDCSIAGCLRFRCDVPSFSVQEELDFTLKGNLSFGWVRQILQKKVSVVSVAEITFDTSVYSQLPGQEAFMRAQTTTVLEKYKVHNPTPLIVGSSIGGLLLLALITAVLYKVGFFKRQYKEMMEEANGQIAPENGTQTPSPPTPHYPQDNV

SEQ ID NO: 68566 - protein, 39 aa, Homo sapiens
ILNTCLTIFLATLAVVFHCFQRIKIASEIGDIFDLKGKT

SEQ ID NO: 68567 - protein, 48 aa, Homo sapiens
ILTMLLMLKLCTEVRVANELNARRRSFTASRWCSCGPVVTPSRRPTSC

SEQ ID NO: 68568 - protein, 57 aa, Homo sapiens
LVPNWLLLLPVASMAEDWLDCPALGPGWKRREVFRKSGATCGRSDTYYQRRQDPKQS

SEQ ID NO: 68569 - protein, 124 aa, Homo sapiens
LEDLTMGRPRPRAAKTWMFLLLLGGAWAENFPDTLNCAEVKIFPQKKCEDAYPGQITDGMVCAGSSKGADTCQGDSGGPLVCDGALQGITSWGSDPCGRSDKPGVYTNICRYLDWIKKIIGSKG

SEQ ID NO: 68570 - protein, 289 aa, Homo sapiens
LCLVLALPALLPVPAVRGVAETPTYPWRDAETGERLVCAQCPPGTFVQRPCRRDSPTTCGPCPPRHYTQFWNYLERCRYCNVLCGEREEEARACHATHNRACRCRTGFFAHAGFCLEHASCPPGAGVIAPGTPSQNTQCQPCPPGTFSASSSSSEQCQPHRNCTALGLALNVPGSSSHDTLCTSCTGFPLSTRVPGAEECERAVIDFVAFQDISIKRLQRLLQALEAPEGWGPTPRAGRAALQLKLRRRLTELLGAQDGALLVRLLQALRVARMPGLERSVRERFLPVH

SEQ ID NO: 68571 - protein, 1220 aa, Homo sapiens
LSPPLRPRLLLLLLLLSPPLLLLLLPCEAEAAAAAAAVSGSAAAEAKECDRPCVNGGRCNPGTGQCVCPAGWVGEQCQHCGGRFRLTGSSGFVTDGPGNYKYKTKCTWLIEGQPNRIMRLRFNHFATECSWDHLYVYDGDSIYAPLVAAFSGLIVPERDGNETVPEVVATSGYALLHFFSDAAYNLTGFNITYSFDMCPNNCSGRGECKISNSSDTVECECSENWKGEACDIPHCTDNCGFPHRGICNSSDVRGCSCFSDWQGPGCSVPVPANQSFWTREEYSNLKLPRASHKAVVNGNIMWVVGGYMFNHSDYNMVLAYDLASREWLPLNRSVNNVVVRYGHSLALYKDKIYMYGGKIDSTGNVTNELRVFHIHNESWVLLTPKAKEQYAVVGHSAHIVTLKNGRVVMLVIFGHCPLYGYISNVQEYDLDKNTWSILHTQGALVQGGYGHSSVYDHRTRALYVHGGYKAFSANKYRLADDLYRYDVDTQMWTILKDSRFFRYLHTAVIVSGTMLVFGGNTHNDTSMSHGAKCFSSDFMAYDIACDRWSVLPRPDLHHDVNRFGHSAVLHNSTMYVFGGFNSLLLSDILVFTSEQCDAHRSEAACLAAGPGIRCVWNTGSSQCISWALATDEQEEKLKSECFSKRTLDHDRCDQHTDCYSCTANTNDCHWCNDHCVPRNHSCSEGQISIFRYENCPKDNPMYYCNKKTSCRSCALDQNCQWEPRNQECIALPENICGIGWHLVGNSCLKITTAKENYDNAKLFCRNHNALLASLTTQKKVEFVLKQLRIMQSSQSMSKLTLTPWVGLRKINVSYWCWEDMSPFTNSLLQWMPSEPSDAGFCGILSEPSTRGLKAATCINPLNGSVCERPANHSAKQCRTPCALRTACGDCTSGSSECMWCSNMKQCVDSNAYVASFPFGQCMEWYTMSTCPPENCSGYCTCSHCLEQPGCGWCTDPSNTGKGKCIEGSYKGPVKMPSQAPTGNFYPQPLLNSSMCLEDSRYNWSFIHCPACQCNGHSKCINQSICEKCENLTTGKHCETCISGFYGDPTNGGKCQPCKCNGHASLCNTNTGKCFCTTKGVKGDECQLCEVENRYQGNPLRGTCYYTLLIDYQFTFSLSQEDDRYYTAINFVATPDEQNRDLDMFINASKNFNLNITWAASFSAGTQAGEEMPVVSKTNIKEYKDSFSNEKFDFRNHPNITFFVYVSNFTWPIKIQVQTEQ

SEQ ID NO: 68572 - protein, 71 aa, Homo sapiens
LMSTLWLVGAGPGLVLAPELLLDPWQGEGQPRGPWRKQETCCRAWAHLAGAAQGLQGSNRDGAQCPGKAWP

SEQ ID NO: 68573 - protein, 37 aa, Homo sapiens
LPTVWLGVASLVWELLSALWRYMAQEAGRGHRCAGPA

SEQ ID NO: 68574 - protein, 65 aa, Homo sapiens [sequence omitted]

SEQ ID NO: 68575 - protein, 30 aa, Homo sapiens
KRTKTCSLLPVDFAGLLLSCGLLSGSVFPL

SEQ ID NO: 68576 - protein, 451 aa, Homo sapiens
LPPLLLLLLLRVPPSRSFPGSGDSPLEDDEVGYSHPRYKDTPWCSPIKVKYGDVYCRAPQGGYYKTALGTRCDIRCQKGYELHGSSLLICQSNKRWSDKVICKQKRCPTLAMPANGGFKCVDGAYFNSRCEYYCSPGYTLKGERTVTCMDNKAWSGRPASCVDMEPPRIKCPSVKERIAEPNKLTVRVSWETPEGRDTADGILTDVILKGLPPGSNFPEGDHKIQYTVYDRAENKGTCKFRVKVRVKRCGKLNAPENGYMKCSSDGDNYGATCEFSCIGGYELQGSPARVCQSNLAWSGTEPTCAAMNVNVGVRTAAALLDQFYEKRRLLIVSTPTARNLLYRLQLGMLQQAQCGLDLRHITVVELVGVFPTLIGRIGAKIMPPALALQLRLLLRIPLYSFSMVLVDKHGMDKERYVSLVMPVALFNLIDTFPLRKEEMVLQAEMSQTCNT

SEQ ID NO: 68577 - protein, 32 aa, Homo sapiens
MQKLLKCSRLVLALALILVLESSVQERRESRT

SEQ ID NO: 68578 - protein, 193 aa, Homo sapiens
MGVCGYLFLPWKCLVVVSLRLLFLVPTGVPVRSGDATFPKAMDNVTVRQGESATLRCTIDNRVTRVAWLNRSTILYAGNDKWCLDPRVVLLSNTQTQYSIEIQNVDVYDEGPYTCSVQTDNHPKTSRVHLIVQGRWAGLGGEIWLASLESLQVKVCSLILNRDELSLFYASGVQGTFLVVILQLEAKFSSHFH

SEQ ID NO: 68579 - protein, 18 aa, Homo sapiens
MCLGWFFFFFSISLRRFP

SEQ ID NO: 68580 - protein, 205 aa, Homo sapiens [sequence omitted]

SEQ ID NO: 68581 - protein, 89 aa, Homo sapiens [sequence omitted]

SEQ ID NO: 68582 - protein, 404 aa, Homo sapiens
MSGLLSQTVILALIFLPQTRPAGVFELQIHSFGPGPGPGAPRSPCSARLPCRLFFRVCLKPGLSEEAAESPCALGAALSARGPVYTEQPGAPAPDLPLPDGLLQVPFRDAWPGTFSFIIETWREELGDQIGGPAWSLLARVAGRRRLAAGGPWARDIQRAGAWELRFSYRARCEPPAVGTACTRLCRPRSAPSRCGPGLRPCAPLEDECEAPLVCRAGCSPEHGFCEQPGECRCLEGWTGPLCTVPVSTSSCLSPRGPSSATTGCLVPGPGPCDGNPCANGGSCSETPRSFECTCPRGFYGLRCEVSGVTCADGPCFNGGLCVGGADPDSAYICHCPPGFQGSNCEKRVDRCSLQPCRNGEAWRPERRGMGWGSWMAQTVQGWNPGFDSSNPRAWGPDLPPASL

SEQ ID NO: 68583 - protein, 40 aa, Homo sapiens
MDPTAMLARHLAAIVFLLFTPKQMVYNEELTFLCSQAKDL

SEQ ID NO: 68584 - protein, 225 aa, Homo sapiens
MELCAMAVVVLLFIAVLKQFGILEPISMEDSSDSELELSTVRHQPEGLDQLQAQTKFTKKELQSLYRGFKNECPTGLVDEDTFKLIYAQFFPQGDATTYAHFLFNAFDADGNGAIHFEDFVVGLSILLRGTVHEKLKWAFNLYDINKDGYITKEEMLAIMKSIYDMMGRHTYPILREDAPAEHVERFFEKMDRNQDGVVTIEEFLEACQKDENIMSSMQLFENVI

SEQ ID NO: 68585 - protein, 807 aa, Homo sapiens [sequence omitted]

SEQ ID NO: 68586 - protein, 1069 aa, Homo sapiens [sequence omitted]

SEQ ID NO: 68587 - protein, 901 aa, Homo sapiens
MFNIHRGFYCLTAILPQICICSQFSVPSSYHFTEDPGAFPVATNGERFPWQELRLPSVVIPLHYDLFVHPNLTSLDFVASEKIEVLVSNATQFIILHSKDLEITNATLQSEEDSRYMKPGKELKVLSYPAHEQIALLVPEKLTPHLKYYVAMDFQAKLGDGFEGFYKSTYRTLGGETRILAVTDFEPTQARMAFPCFDEPLFKANFSIKIRRESRHIALSNMPKVSIYASPDKRNQTHYALQASLKLLDFYEKYFDIYYPLSKLDLIAIPDFAPGAMENWGLITYRETSLLFDPKTSSASDKLWVTRVIAHELAHQWFGNLVTMEWWNDIWLKEGFAKYMELIAVNATYPELQFDDYFLNVCFEVITKDSLNSSRPISKPAETPTQIQEMFDEVSYNKGACILNMLKDFLGEEKFQKGIIQYLKKFSYRNAKNDDLWSSLSNSCLESDFTSGGVCHSDPKMTSNMLAFLGENAEVKEMMTTWTLQKGIPLLVVKQDGCSLRLQQERFLQGVFQEDPEWRALQERYLWHIPLTYSTSSSNVIHRHILKSKTDTLDLPEKTSWVKFNVDSNGYYIVHYEGHGWDQLITQLNQNHTLLRPKDRVGLIHDVFQLVGAGRLTLDKALDMTYYLQHETSSPALLEGLSYLESFYHMMDRRNISDISENLKRYLLQYFKPVIDRQSWSDKGSVWDRMLRSALLKLACDLNHAPCIQKAAELFSQWMESSGKLNIPTDVLKIVYSVGAQTTAGWNYLLEQYELSMSSAEQNKILYALSTSKHQEKLLKLIELGMEGKVIKTQNLAALLHAIARRPKGQQLAWDFVRENWTHLLKKFDLGSYDIRMIISGTTAHFSSKDKLQEVKLFFESLEAQGSHLDIFQTVLETITKNIKWLEKNLPTLRTWLMVNT

SEQ ID NO: 68588 - protein, 178 aa, Homo sapiens
MLHVEMLTLVFLVLWMCVFSQDPGSKAVADRYAVYWNSSNPRFQRGDYHIDVCINDYLDVFCPHYEDSVPEDKTERYVLYMVNFDGYSACDHTSKGFKRWECNRPHSPNGPLKFSEKFQLFTPFSLGFEFRPGREYFYICEYIEIYRVVGQLQEPRLIFYPCFRELQRAGLCITDISL

SEQ ID NO: 68589 - protein, 793 aa, Homo sapiens
MQTKVQNKKRQVAFFILLMLWGEVGSESIQYSVLEETESGTFVANLTKDLGLRVGELASRGARVVFKGNRQHLQFDPQTHDLLLNEKLDREELCGSTEPCVLPFQVLLENPLQFFQASLRVRDINDHAPEFPAREMLLKISEITMPGKIFPLKMAHDLDTGSNGLQRYTISSNPHFHVLTRNRSEGRKFPELVLDKPLDREEQPQLRLTLIALDGGSPPRSGTSEIQIQVLDINDNVPEFAQELYEAQVPENNPLGSLVITVSARDLDAGSFGKVSYALFQVDDVNQPFEINAITGEIRLRKALDFEEIQSYDVDVEATDGGGLSGKCSLVVRVLDVNDNAPELTMSFFISLIPENLPEITVAVFSVSDADSGHNQQVICSIENNLPFLLRPSVENFYTLVTEGALDRESRAEYNITITVTDLGTPRLKTQQSITVQVSDVNDNAPAFTQTSYTLFVRENNSPALHIGSVSATDRDSGINAQVTYSLLPPQDPHLPLSSLVSINADNGHLFALRSLDYEALQSFEFRVGATDRGSPALSSEALVRLLVLDANDNSPFVLYPLQNGSAPCTELVPRAAEPGYLVTKVVAVDGDSGQNAWLSYQLLKATELGLFGVWAHNGEVRTARLLSERDAAKHRLVVLVKDNGEPPRSATATLHVLLVDGFSQPYLPLPEAAPAQAQADSLTVYLVVALASVSSLFLFSVLLFVAVRLCRRSRAASVGRYSVPEGPFPGHLVDVSGTGTLSQSYQYKVCLTGGSETNEFKFLKPIMPNFPPQGTEREMEETPTSRNSFPFS

SEQ ID NO: 68590 - protein, 801 aa, Homo sapiens
MKSQVLFPFLLSLFCGAISQQIRYTIPEELANGSRVGKLAKDLGLSVRELPTRKLRVSAEDYFNVSLESGDLLVNGRIDREKICGRKLECALEFETVAENPMNVFHVVVVIQDINDNAPRFVAKGIDLEICESALPGVKFSLDSAQDADVEGNSLKLYTINPNQYFSLSTKESPDGSKYPVLLLEKPLDREHQSSHRLILTAMDGGDPPLSGTTHIWIRVTDANDNAPVFSQEVYRVSLQENVPWGTSVLRVMATDQDEGINAEITYAFLNSPISTSLFNLNPNTGDITTNGTLDFEETSRYVLSVEAKDGGVHTAHCNVQIEIVDENDNAPEVTFMSFSNQIPEDSDLGTVIALIKVRDKDSGQNGMVTCYTQEEVPFKLESTSKNYYKLVIAGALNREQTADYNVTIIATDKGKPALSSRTSITLHISDINDNAPVFHQASYVVHVSENNPPGASIAQVSASDPDLGPNGRVSYSILASDLEPRELLSYVSVSPQSGVVFAQRAFDHEQLRAFELTLQARDQGSPALSANVSLRVLVGDLNDNAPRVLYPALGPDGSALFDMVPRAAEPGYLVTKVVAVDADSGHNAWLSYHVLQASEPGLFSLGLRTGEVRTARALGDRDAARQRLLVAVRDGGQPPLSATATLHLIFADSLQEVLPDLSDRPEPSDPQTELQFYLVVALALISVLFLLAVILAIALRLRRSSSLDTEGCFQTGLCSKSGPGVPPNHSEGTLPYSYNLCIASHSAKTEFNSLNLTPEMAPPQDLLCDDPSMVVCASNEDHKIAYDPSLSSHVSFCKSS

SEQ ID NO: 68591 - protein, 1211 aa, Homo sapiens
MLGFSGPLLLSLLVGFLEEGQEPLSHGLLYALGLAGGAVLGAVLQNQYGYEVYKVTLQARGAVLNILYCKALQLGPSRPPTGEALNLLGTDSERLLNFAGSFHEAWGLPLQLAITLYLLYQQVGVAFVGGLILALLLVPVNKVIATRIMASNQEMLQHKDARVKLVTELLSGIRVIKFCGWEQALGARVEACRARELGRLRVIKYLDAACVYLWAALPVVISIVIFITYVLMGHQLTATKVFTALALVRMLILPLNNFPWVINGLLEAKVSLDRIQLFLDLPNHNPQAYYSPDCGRLGAQIKWLLCSDPPAEPSTVLELHGALFSWDPVGTSLETFISHLEVKKGMLVGIVGKVGCGKSSLLAAIAGELHRLRGHVAVRGLSKGFGLATQEPWIQFATIRDNILFGKTFDAQLYKEVLEACALNDDLSILPAGDQTEVGEKGVTLSGGQRARIALARAVYQEKELYLLDDPLAAVDADVANHLLHRCILGMLSYTTRLLCTHRTEYLERADAVLLMEAGRLIRAGPPSEILPLVQAVPKAWAENGQESDSATAQSVQNPEKTKEGLEEEQSTSGRLLQEESKKEGAVALHVYQAYWKAVGQGLALAILFSLLLMQATRNAADWWLSHWISQLKAENSSQEAQPSTSPASMGLFSPQLLLFSPGNLYIPVFPLPKAAPNGSSDIRFYLTVYATIAGVNSLCTLLRAVLFAAGTLQAAATLHRRLLHRVLMAPVTFFNATPTGRILNRFSSDVACADDSLPFILNILLANAAGLLGLLAVLGSGLPWLLLLLPPLSIMYYHVQRHYRASSRELRRLGSLTLSPLYSHLADTLAGLSVLRATGATYRFEEENLRLLELNQRCQFATSATMQWLDIRLQLMGAAVVSAIAGIALVQHQQGLANPGLVGLSLSYALSLTGLLSGLVSSFTQTEAMLVSVERLEEYTCDLPQEPQGQPLQLGTGWLTQGGVEFQDVVLAYRPGLPNALDGVTFCVQPGEKLGIVGRTGSGKSSLLLVLFRLLEPSSGRVLLDGVDTSQLELAQLRSQLAIIPQEPFLFSGTVRENLDPQGLHKDRALWQALKQCHLSEVITSMGGLDGELGEGGRSLSLGQRQLLCLARALLTDAKILCIDEATASVDQKTDQLLQQTICKRFANKTVLTIAHRLNTILNSDRVLVLQAGRVVELDSPATLRNQPHSLFQQLLQSSQQGVPASLGGP

SEQ ID NO: 68592 - protein, 1186 aa, Homo sapiens
MWSCHWKWKPSPLLFLFALYIMCVPHSVWGCANCRVVLSNPSGTFTSPCYPNDYPNSQACMWTLRAPTGYIIQITFNDFDIEEAPNCIYDSLSLDNGESQTKFCGATAKGLSFNSSANEMHVSFSSDFSIQKKGFNASYIRVAVSLRNQKVILPQTSDAYQVSVAKSISIPELSAFTLCFEATKVGHEDSDWTAFSYSNASFTQLLSFGKAKSGYFLSISDSKCLLNNALPVKEKEDIFAESFEQLCLVWNNSLGSIGVNFKRNYETVPCDSTISKVIPGNGKLLLGSNQNEIVSLKGDIYNFRLWNFTMNAKILSNLSCNVKGNVVDWQNDFWNIPNLALKAESNLSCGSYLIPLPAAELASCADLGTLCQDGIIYRISVVIQNILRHPEVKVQSKVAEWLNSTFQNWNYTVYVVNISFHLSAGEDKIKVKRSLEDEPRLVLWALLVYNATNNTNLEGKIIQQKLLKNNESLDEGLRLHTVNVRQLGHCLAMEEPKGYYWPSIQPSEYVLPCPDKPGFSASRICFYNATNPLVTYWGPVDISNCLKEANEVANQILNLTADGQNLTSANITNIVEQVKRIVNKEENIDITLGSTLMNIFSNILSSSDSDLLESSSEALKTIDELAFKIDLNSTSHVNITTRNLALSVSSLLPGTNAISNFSIGLPSNNESYFQMDFESGQVDPLASVILPPNLLENLSPEDSVLVRRAQFTFFNKTGLFQDVGPQRKTLVSYVMACSIGNITIQNLKDPVQIKIKHTRTQEVHHPICAFWDLNKNKSFGGWNTSGCVAHRDSDASETVCLCNHFTHFGVLMDLPRSASQLDARNTKVLTFISYIGCGISAIFSAATLLTYVAFEKLRRDYPSKILMNLSTALLFLNLLFLLDGWITSFNVDGLCIAVAVLLHFFLLATFTWMGLEAIHMYIALVKVFNTYIRRYILKFCIIGWGLPALVVSVVLASRNNNEVYGKESYGKEKGDEFCWIQDPVIFYVTCAGYFGVMFFLNIAMFIVVMVQICGRNGKRSNRTLREEVLRNLRSVVSLTFLLGMTWGFAFFAWGPLNIPFMYLFSIFNSLQGLFIFIFHCAMKENVQKQWRQHLCCGRFRLADNSDWSKTATNIIKKSSDNLGKSLSSSSIGSNSTYLTSKSKSSSTTYFKRNSHTDNVSYEHSFNKSGSLRQCFHGQVLVKTGPC

SEQ ID NO: 68593 - protein, 1215 aa, Homo sapiens
MWSCHWKWKPSPLLFLFALYIMCVPHSVWGCANCRVVLSNPSGTFTSPCYPNDYPNSQACMWTLRAPTGYIIQITFNDFDIEEAPNCIYDSLSLDNGESQTKFCGATAKGLSFNSSANEMHVSFSSDFSIQKKGFNASYIRVAVSLRNQKVILPQTSDAYQVSVAKSISIPELSAFTLCFEATKVGHEDSDWTAFSYSNASFTQLLSFGKAKSGYFLSISDSKCLLNNALPVKEKEDIFAESFEQLCLVWNNSLGSIGVNFKRNYETVPCDSTISKVIPGNGKLLLGSNQNEIVSLKGDIYNFRLWNFTMNAKILSNLSCNVKGNVVDWQNDFWNIPNLALKAESNLSCGSYLIPLPAAELASCADLGTLCQDGIIYRISVVIQNILRHPEVKVQSKVAEWLNSTFQNWNYTVYVVNISFHLSAGEDKIKVKRSLEDEPRLVLWALLVYNATNNTNLEGKIIQQKLLKNNESLDEGLRLHTVNVRQLGHCLAMEEPKGYYWPSIQPSEYVLPCPDKPGFSASRICFYNATNPLVTYWGPVDISNCLKEANEVANQILNLTADGQNLTSANITNIVEQVKRIVNKEENIDITLGSTLMNIFSNILSSSDSDLLESSSEALKTIDELAFKIDLNSTSHVNITTRNLALSVSSLLPGTNAISNFSIGLPSNNESYFQMDFESGQVDPLASVILPPNLLENLSPEDSVLVRRAQFTFFNKTGLFQDVGPQRKTLVSYVMACSIGNITIQNLKDPVQIKIKHTRTQEVHHPICAFWDLNKNKSFGGWNTSGCVAHRDSDASETVCLCNHFTHFGVLMDLPRSASQLDARNTKVLTFISYIGCGISAIFSAATLLTYVAFEKLRRDYPSKILMNLSTALLFLNLLFLLDGWITSFNVDGLCIAVAVLLHFFLLATFTWMGLEAIHMYIALVKVFNTYIRRYILKFCIIGWGLPALVVSVVLASRNNNEVYGKESYGKEKGDEFCWIQDPVIFYVTCAGYFGVMFFLNIAMFIVVMVQICGRNGKRSNRTLREEVLRNLRSVVSLTFLLGMTWGFAFFAWGPLNIPFMYLFSIFNSLQGLFIFIFHCAMKENVQKQWRQHLCCGRFRLADNSDWSKTATNIIKKSSDNLGKSLSSSSIGSNSTYLTSKSKSSSTTYFKRNSHTDSASMDKSLSKLAHADGDQTSIIPVHQVIDKVKGYCNAHSDNFYKNIIMSDTFSHSTKF

SEQ ID NO: 68594 - protein, 15 aa, Homo sapiens
MSLAISFSFPLLACV

SEQ ID NO: 68595 - protein, 433 aa, Homo sapiens
MKRGLCCVLLLCGAVFVSPSQEIHARFRRGARSYQVICRDEKTQMIYQQHQSWLRPVLRSNRVEYCWCNSGRAQCHSVPVKRNSDCYFGNGSAYRGTHSLTESGASCLPWNSMILIGKVYTAQNPSAQALGLGKHNYCRNPDGDAKPWCHVLKNRRLTWEYCDVPSCSTCGLRQYSQPQFRIKGGLFADIASHPWQAAIFAKHRRSPGERFLCGGILISSCWILSAAHCFQERFPPHHLTVILGRTYRVVPGEEEQKFEVEKYIVHKEFDDDTYDNDIALLQLKSDSSRCAQESSVVRTVCLPPADLQLPDWTECELSGYGKHEALSPFYSERLKEAHVRLYPSSRCTSQHLLNRTVTDNMLCAGDTRSGGPQANLHDACQGDSGGPLVCLNDGRMTLVGIISWGLGCGQKDVPGVYTKVTNYLDWIRDNMRP

SEQ ID NO: 68596 - protein, 21 aa, Homo sapiens
LLGLFYVFGIILAPAGSLPKI

SEQ ID NO: 68597 - protein, 243 aa, Homo sapiens
LSLIFSALFILFGTVIVQAFSDSNDERESSPPEKEEAQEKTGKTEPSFTKENSSKIPKKGFVEVTELTDVTYTSNLVRLRPGHMNVVLILSNSTKTSLLQKFALEVYTFTGSSCLHFSFLSLDKHREWLEYLLEFAQDAAPIPNQYDKHFMERDYTGYVLALNGHKKYFCLFKPQKTVEEEEAIGSCSDVDSSLYLGESRGKPSCGLGSRPIKGKLSKLSLWMERLLEGSLQRFYIPSWPELD

SEQ ID NO: 68598 - protein, 48 aa, Homo sapiens
KWHQTISLALILFSNYYAFFKLLRDRLVLGKAYSYSASPQRDLDHRFS

SEQ ID NO: 68599 - protein, 186 aa, Homo sapiens
VAATVAAAWLLLWAAACAQQEQDFYDFKAVNIRGKLVSLEKYRGSVSLVVNVASECGFTDQHYRALQQLQRDLGPHHFNVLAFPCNQFGQQEPDSNKEIESFARRTYSVSFPMFSKIAVTGTGAHPAFKYLAQTSGKEPTWNFWKYLVAPDGKVVGAWDPTVSVEEVRPQITALVRKLILLKREDL

SEQ ID NO: 68600 - protein, 226 aa, Homo sapiens
LSLLELLGFNLTFVFLASLLVLIEPVAAGSGIPEVKCYLNGVKVPGIVRLRTLLCKVLGVLFSVAGGLFVEKEGPMIHSGSVVGAGLPQFQSISLRKIQFNFPYFRSDRDKRDFVSAGAAAGVAAAFGAPIGGTLFSLEEGSSFWNQGLTWKVLFCSMSATFTLNFFRSGIQFGSWGSFQLPGLLNFGEFKSLREPPCVSGNHRGGVCGLDGVRRMPTDVLFESNR

SEQ ID NO: 68601 - protein, 518 aa, Homo sapiens
LALLWALGLLGAGSPLPSWPLPNIGGTEEQQAESEKAPREPLEPQVLQDDLPISLKKVLQTSLPEPLRIKLELDGDSHILELLQNRELVPGLNFSNCSRRALEKALLDGMGSCLFERLPSLPPMAAFCGNMFVEPGEQCDCGFLDDCVDPCCDSLTCQLRPGAQCASDGPCCQNCQLRPSGWQCRPTRGDCDLPEFCPGDSSQCPPDVSLGDGEPCAGGQAVCMHGRCASYAQQCQSLWGPGAQPAAPLCLQTANTRGNAFGSCGRNPSGSYVSCTPRDAICGQLQCQTGRTQPLLGSIRDLLWETIDVNGTELNCSWVHLDLGSDVAQPLLTLPGTACGPGLVCIDHRCQRVDLLGAQECRSKCHGHGVCDSNRHCYCEEGWAPPDCTTQLKATSSLTTGLLLSLLVLLVLVMLGASYWYRARLHQRLCQLKGPTCQYRAAQSGPSERPGPPQRALLARGTKSQGPAKPPPPRKPLPADPQGRCPSGDLPGPGAGIPPLVVPSRPAPPPPTVSSLYL

SEQ ID NO: 68602 - protein, 847 aa, Homo sapiens
LVLFLLLPILSSAKAQVNPAICRYPLGMSGGQIPDEDITASSQWSESTAAKYGRLDSEEGDGAWCPEIPVEPDDLKEFLQIDLHTLHFITLVGTQGRHAGGHGIEFAPMYKINYSRDGTRWISWRNRHGKQVLDGNSNPYDIFLKDLEPPIVARFVRFIPVTDHSMNVCMRVELYGCVWLDGLVSYNAPAGQQFVLPGGSIIYLNDSVYDGAVGYSMTEGLGQLTDGVSGLDDFTQTHEYHVWPGYDYVGWRNESATNGYIEIMFEFDRIRNFTTMKVHCNNMFAKGVKIFKEVQCYFRSEASEWEPNAISFPLVLDDVNPSARFVTVPLHHRMASAIKCQYHFADTWMMFSEITFQSDAAMYNNSEALPTSPMAPTTYDPMLKVDDSNTRILIGCLVAIIFILLAIIVIILWRQFWQKMLEKASRRMLDDEMTVSLSLPSDSSMFNNNRSSSPSEQGSNSTYDRIFPLRPDYQEPSRLIRKLPEFAPGEEESGCSGVVKPVQPSGPEGVPHYAEADIVNLQGVTGGNTYSVPAVTMDLLSGKDVAVEEFPRKLLTFKEKLGEGQFGEVHLCEVEGMEKFKDKDFALDVSANQPVLVAVKMLRADANKNARNDFLKEIKIMSRLKDPNIIHLLAVCITDDPLCMITEYMENGDLNQFLSRHEPPNSSSSDVRTVSYTNLKFMATQIASGMKYLSSLNFVHRDLATRNCLVGKNYTIKIADFGMSRNLYSGDYYRIQGRAVLPIRWMSWESILLGKFTTASDVWAFGVTLWETFTFCQEQPYSQLSDEQVIENTGEFFRDQGRQTYLPQPAICPDSVYKLMLSCWRRDTKNRPSFQEIHLLLLQQGDE

SEQ ID NO: 68603 - protein, 39 aa, Homo sapiens
LLWLSLPVRLPSFVVSQRCAGLLLAALRIQGVGCQVQVS

SEQ ID NO: 68604 - protein, 250 aa, Homo sapiens
LWSVLAAALGLLTAGVSALEVYTPKEIFVANGTQGKLTCKFKSTSTTGGLTSVSWSFQPEGADTTVSFFHYSQGQVYLGNYPPFKDRISWAGDLDKKDASINIENMQFIHNGTYICDVKNPPDIVVQPGHIRLYVVEKENLPVFPVWVVVGIVTAVVLGLTLLISMILAVLYRRKNSKRDYTGCSTSESLSPVKQAPRKSPSDTEGLVKSLPSGSHQGPVIYAQLDHSGGHHSDKINKSESVVYADIRKN

SEQ ID NO: 68605 - protein, 424 aa, Homo sapiens
LLLLLLFACCWAPGGANLSQDGYWQEQDLELGTLAPLDEAISSTVWSSPDMLASQDSQPWTSDETVVAGGTVVLKCQVKDHEDSSLQWSNPAQQTLYFGEKRALRDNRIQLVTSTPHELSISISNVALADEGEYTCSIFTMPVRTAKSLVTVLGIPQKPIITGYKSSLREKDTATLNCQSSGSKPAARLTWRKGDQELHGEPTRIQEDPNGKTFTVSSSVTFQVTREDDGASIVCSVNHESLKGADRSTSQRIEVLYTPTAMIRPDPPHPREGQKLLLHCEGRGNPVPQQYLWEKEGSVPPLKMTQESALIFPFLNKSDSGTYGCTATSNMGSYKAYYTLNVNDPSPVPSSSSTYHAIIGGIVAFIVFLLLIMLIFLGHYLIRHKGTYLTHEAKGSDDAPDADTAIINAEGGQSGGDDKKEYFI

SEQ ID NO: 68606 - protein, 15 aa, Homo sapiens
RKFPRGPPRWLLCLM

SEQ ID NO: 68607 - protein, 876 aa, Homo sapiens
LASRPLLLALLSLALCRGRVVRVPTATLVRVVGTELVIPCNVSDYDGPSEQNFDWSFSSLGSSFVELASTWEVGFPAQLYQERLQRGEILLRRTANDAVELHIKNVQPSDQGHYKCSTPSTDATVQGNYEDTVQVKVLADSLHVGPSARPPPSLSLREGEPFELRCTAASASPLHTHLALLWEVHRGPARRSVLALTHEGRFHPGLGYEQRYHSGDVRLDTVGSDAYRLSVSRALSADQGSYRCIVSEWIAEQGNWQEIQEKAVEVATVVIQPSVLRAAVPKNVSVAEGKELDLTCNITTDRADDVRPEVTWSFSRMPDSTLPGSRVLARLDRDSLVHSSPHVALSHVDARSYHLLVRDVSKENSGYYYCHVSLWAPGHNRSWHKVAEAVSSPAGVGVTWLEPDYQVYLNASKVPGFADDPTELACRVVDTKSGEANVRFTVSWYYRMNRRSDNVVTSELLAVMDGDWTLKYGERSKQRAQDGDFIFSKEHTDTFNFRIQRTTEEDRGNYYCVVSAWTKQRNNSWVKSKDVFSKPVNIFWALEDSVLVVKARQPKPFFAAGNTFEMTCKVSSKNIKSPRYSVLIMAEKPVGDLSSPNETKYIISLDQDSVVKLENWTDASRVDGVVLEKVQEDEFRYRMYQTQVSDAGLYRCMVTAWSPVRGSLWREAATSLSNPIEIDFQTSGPIFNASVHSDTPSVIRGDLIKLFCIITVEGAALDPDDMAFDVSWFAVHSFGLDKAPVLLSSLDRKGIVTTSRRDWKSDLSLERVSVLEFLLQVHGSEDQDFGNYYCSVTPWVKSPTGSWQKEAEIHSKPVFITVKMDVLNAFKYPLLIGVGLSTVIGLLSCLIGYCSSHWCCKKEVQETRRERRRLMSMEMD

SEQ ID NO: 68608 - protein, 109 aa, Homo sapiens
RLLGVISLLHLVLSMGLQLYGFRQRQRARKEWRLHRGLSHRRASLEERAVSRNPLCTLCLEERRHPTATPCGHLFCWECITAWCSSKAECPLCREKFPPQKLIYLRHYR

SEQ ID NO: 68609 - protein, 411 aa, Homo sapiens
LPPLLLLLLAGRAAGAQRWRSENFERPVDLEGSGDDDSFPDDELDDLYSGSGSGYFEQESGIETAMRFSPDVALAVSTTPAVLPTTNIQPVGTPFEELPSERPTLEPATSPLVVTEVPEEPSQRATTVSTTMATTAATSTGDPTVATVPATVATATPSTPAAPPFTATTAVIRTTGVRRLLPLPLTTVATARATTPEAPSPPTTAAVLDTEAPTPRLVSTATSRPRALPRPATTQEPDIPERSTLPLGTTAPGPTEVAQTPTPETFLTTIRDEPEVPVSGGPSGDFELPEEETTQPDTANEVVAVGGAAAKASSPPGTLPKGARPGPGLLDNAIDSGSSAAQLPQKSILERKEVLVAVIVGGVVGALFAAFLVTLLIYRMKKKDEGSYTLEEPKQASVTYQKPDKQEEFYA

SEQ ID NO: 68610 - protein, 1213 aa, Homo sapiens
KCFFPVLSCLAVLGVVSAQRQVTVQEGPLYRTEGSHITIWCNVSGYQGPSEQNFQWSIYLPSSPEREVQIVSTMDSSFPYAIYTQRVRGGKIFIERVQGNSTLLHITDLQARDAGEYECHTPSTDKQYFGSYSAKMNLVVIPDSLQTTAMPQTLHRVEQDPLELTCEVASETIQHSHLSVAWLRQKVGEKPVEVISLSRDFMLHSSSEYAQRQSLGEVRLDKLGRTTFRLTIFHLQPSDQGEFYCEAAEWIQDPDGSWYAMTRKRSEGAVVNVQPTDKEFTVRLETEKRLHTVGEPVEFRCILEAQNVPDRYFAVSWAFNSSLIATMGPNAVPVLNSEFAHREARGQLKVAKESDSVFVLKIYHLRQEDSGKYNCRVTEREKTVTGEFIDKESKRPKNIPIIVLPLTDNWVVKVPQHHQLLSQGHLESSISVEVASNASVILEGEDLRFSCSVRTAGRPQGRFSVIWQLVDRQNRRSNIMWLDRDGTVQPGSSYWERSSFGGVQMEQVQPNSFSLGIFNSRKEDEGQYECHVTEWVRAVDGEWQIVGERRASTPISITALEMGFAVTAISRTPGVTYSDSFDLQCIIKPHYPAWVPVSVTWRFQPVGTVEFHDLVTFTRDGGVQWGDRSSSFRTRTAIEKAESSNNVRLSISRASDTEAGKYQCVAELWRKNYNNTWTRLAERTSNLLEIRVLQPVTKLQVSKSKRTLTLVENKPIQLNCSVKSQTSQNSHFAVLWYVHKPSDADGKLILKTTHNSAFEYGTYAEEEGLRARLQFERHVSGGLFSLTVQRAEVSDSGSYYCHVEEWLLSPNYAWYKLAEEVSGRTEVTVKQPDSRLRLSQAQGNLSVLETRQVQLECVVLNRTSITSQLMVEWFVWKPNHPERETVARLSRDATFHYGEQAAKNNLKGRLHLESPSPGVYRLFIQNVAVQDSGTYSCHVEEWLPSPSGMWYKRAEDTAGQTALTVMRPDASLQVDTVVPNATVSEKAAFQLDCSIVSRSSQDSRFAVAWYSLRTKAGGKRSSPGLEEQEEEREEEEEEDDDDDDDPTERTALLSVGPDAVFGPEGSPWEGRLRFQRLSPVLYRLTVLQASPQDTGNYSCHVEEWLPSPQKEWYRLTEEESAPIGIRVLDTSPTLQSIICSNDALFYFVFFYPFPIFGILIITILLVRFKSRNSSKNSDGKNGVPLLWIKEPHLNYSPTCLEPPVLSIHPGAID

SEQ ID NO: 68611 - protein, 911 aa, Homo sapiens
VAATAAFCLVSATSVWTAGAEPMSREEKQKLGNQVLEMFDHAYGNYMEHAYPADELMPLTCRGRVRGQEPSRGDVDDALGKFSLTLIDSLDTLVVLNKTKEFEDAVRKVLRDVNLDNDVVVSVFETNIRVLGGLLGGHSLAIMLKEKGEYMQWYNDELLQMAKQLGYKLLPAFNTTSGLPYPRINLKFGIRKPEARTGTETDTCTACAGTLILEFAALSRFTGATIFEEYARKALDFLWEKRQRSSNLVGVTINIHTGDWVRKDSGVGAGIDSYYEYLLKAYVLLGDDSFLERFNTHYDAIMRYISQPPLLLDVHIHKPMLNARTWMDALLAFFPGLQVLKGDIRPAIETHEMLYQVIKKHNFLPEAFTTDFRVHWAQHPLRPEFAESTYFLYKATGDPYYLEVGKTLIENLNKYARVPCGFAAMKDVRTGSHEDRMDSFFLAEMFKYLYLLFADKEDIIFDIEDYIFTTEAHLLPLWLSTTNQSISKKNTTSEYTELDDSNFDWTCPNTQILFPNDPLYAQSIREPLKNVVDKSCPRGIIRVEESFRSGAKPPLRARDFMATNPEHLEILKKMGVSLIHLKDGRVQLVQHAIQAASSIDAEDGLRFMQEMIELSSQQQKEQQLPPRAVQIVSHPFFGRVVLTAGPAQFGLDLSKHKETRGFVASSKPSNGCSELTNPEAVMGKIALIQRGQCMFAEKARNIQNAGAIGGIVIDDNEGSSSDTAPLFQMAGDGKDTDDIKIPMLFLFSKEGSIILDAIREYEEVEVLLSDKAKDRDPEMENEEQPSSENDSQNQSGEQISSSSQEVDLVDQESSEENSLNSHPESLSLADMDNAASISPSEQTSNPTENHETTNLNGECTDLDNQLQEQSETEEDSNPNVSWGKKVQPIDSILADWNEDIEAFEMMEKDEL

SEQ ID NO: 68612 - protein, 1240 aa, Homo sapiens
IRAAWTRALLLPLLLAGPVGCLSRQELFPFGPGQGDLELEDGDDFVSPALELSGALRFYDRSDIDAVYVTTNGIIATSEPPAKESHPGLFPPTFGAVAPFLADLDTTDGLGKVYYREDLSPSITQRAAECVHRGFPEISFQPSSAVVVTWESVAPYQGPSRDPDQKGKRNTFQAVLASSDSSSYAIFLYPEDGLQFHTTFSKKENNQVPAVVAFSQGSVGFLWKSNGAYNIFANDRESVENLAKSSNSGQQGVWVFEIGSPATTNGVVPADVILGTEDGAEYDDEDEDYDLATTRLGLEDVGTTPFSYKALRRGGADTYSVPSVLSPRRAATERPLGPPTERTRSFQLAVETFHQQHPQVIDVDEVEETGVVFSYNTDSRQTCANNRHQCSVHAECRDYATGFCCSCVAGYTGNGRQCVAEGSPQRVNGKVKGRIFVGSSQVPIVFENTDLHSYVVMNHGRSYTAISTIPETVGYSLLPLAPVGGIIGWMFAVEQDGFKNGFSITGGEFTRQAEVTFVGHPGNLVIKQRFSGIDEHGHLTIDTELEGRVPQIPFGSSVHIEPYTELYHYSTSVITSSSTREYTVTEPERDGASPSRIYTYQWRQTITFQECVHDDSRPALPSTQQLSVDSVFVLYNQEEKILRYALSNSIGPVREGSPDALQNPCYIGTHGCDTNAACRPGPRTQFTCECSIGFRGDGRTCYDIDECSEQPSVCGSHTICNNHPGTFRCECVEGYQFSDEGTCVAVVDQRPINYCETGLHNCDIPQRAQCIYTGGSSYTCSCLPGFSGDGQACQDVDECQPSRCHPDAFCYNTPGSFTCQCKPGYQGDGFRCVPGEVEKTRCQHEREHILGAAGATDPQRPIPPGLFVPECDAHGHYAPTQCHGSTGYCWCVDRDGREVEGTRTRPGMTPPCLSTVAPPIHQGPAVPTAVIPLPPGTHLLFAQTGKIERLPLEGNTMRKTEAKAFLHVPAKVIIGLAFDCVDKMVYWTDITEPSIGRASLHGGEPTTIIRQDLGSPEGIAVDHLGRNIFWTDSNLDRIEVAKLDGTQRRVLFETDLVNPRGIVTDSVRGNLYWTDWNRDNPKIETSYMDGTNRRILVQDDLGLPNGLTFDAFSSQLCWVDAGTNRAECLNPSQPSRRKALEGLQYPFAVTSYGKNLYFTDWKMNSVVALDLAISKETDAFQPHKQTRLYGITTALSQCPQGHNYCSVNNGGCTHLCLATPGSRTCRCPDNTLGVDCIEQK

SEQ ID NO: 68613 - protein, 2118 aa, Homo sapiens
LRWLFGVAAVVTDVGQILLVDLCLDDLSCNQNEVEASDLEVLTGIPAEVPHIRESVMRQGRHLCFQLVSPTGTAVSTLSYISRTNQLAVGFSDGYLALWNMKSMKREYYIQLESGQVPVYAVTFQEPENDPRNCCYLWAVQSTQDSEGDVLSLHLLQLAFGNRKCLASGQILYEGLEYCEERYTLDLTGGMFPLRGQTSNTKLLGCQSIEKFRSHGDREEGVNEALSPDTSVSVFTWQVNIYGQGKPSVYLGLFDINRWYHAQMPDSLRSGEYLHNCSYFALWSLESVVSRTSPHGILDILVHERSLNRGVPPSYPPPEQFFNPSTYNFDATCLLNSGVVHLTCTGFQKETLTFLKKSGPSLNELIPDGYNRCLVAGLLSPRFVDVQPSSLSQEEQLEAILSAAIQTSSLGLLTGYIRRWITEEQPNSATNLRFVLEWTWNKVVLTKEEFDRLCVPLFDGSCHFMDPQTIQSIQQCYLLLSNLNIVLSCFASEAREITERGLIDLSNKFVVSHLICQYAQVVLWFSHSGLLPEGIDDSVQLSRLCYNYPVIQNYYTSRRQKFERLSRGKWNPDCLMIDGLVSQLGERIEKLWKRDEGGTGKYPPASLHAVLDMYLLDGVTEAAKHSITIYLLLDIMYSFPNKTDTPIESFPTVFAISWGQVKLIQGFWLIDHNDYESGLDLLFHPATAKPLSWQHSKIIQAFMSQGEHRQALRYIQTMKPTVSSGNDVILHLTVLLFNRCMVEAWNFLRQHCNRLNIEELLKHMYEVCQEMGLMEDLLKLPFTDTEQECLVKFLQSSASVQNHEFLLVHHLQRANYVPALKLNQTLKINVMNDRDPRLRERSLARNSILDQYGKILPRVHRKLAIERAKPYHLSTSSVFRLVSRPKPLSAVPKQVVTGTVLTRSVFINNVLSKIGEVWASKEPINSTTPFNSSKIEEPSPIVYSLPAPELPEAFFGTPISKASQKISRLLDLVVQPVPRPSQCSEFIQQSSMKSPLYLVSRSLPSSSQLKGSPQAISRASELHLLETPLVVKKAKSLAMSVTTSGFSEFTPQSILRSTLRSTPLASPSPSPGRSPQRLKETRISFVEEDVHPKWIPGAADDSKLEVFTTPKKCAVPVETEWLKSKDRTTSFFLNSPEKEHQEMDEGSQSLEKLDVSKGNSSVSITSDETTLEYQDAPSPEDLEETVFTASKPKSSSTALTTNVTEQTEKDGDKDVFASEVTPSDLQKQMGNLEDAETKDLLVAAEAFSELNHLSPVQGTEASLCAPSVYEGKIFTQKSKVPVLDEGLTSVETYTPAIRANDNKSMADVLGDGGNSSLTISEGPIVSERRLNQEVALNLKEDHEVEVGVLKESVDLPEEKLPISDSPPDTQEIHVIEQEKLEAQDSGEEARNLSFNELYPSGTLKLQYNFDTIDQQFCDLADNKDTAECDIAEVDGELFVAQSNFTLILEGEEGEVEPGDFASSDVLPKAANTATEEKLVCSGENDNHGQIANLPSAVTSDQKSQKVDTLPYVPEPIKVAIAENLLDVIKDTRSKEITSDTMEQSIHETIPLVSQNIMCPTKLVKSAFKTAQETSTMTMNVSQVDDVVSSKTRTRGQRIQNVNVKSAQQEASADVATPKMPGQSVRKKTRKAKEISEASENIYSDVRGLSQNQQIPQNSVTPRRGRRKKEVNQDILENTSSVEQELQITTGRESKRLKSSQLLEPAVEETTKKEVKVSSVTKRTPRRIKRSVENQESVEIINDLKVSTVTSPSRMIRKLRSTNLDASENTGNKQDDKSSDKQLRIKHVRRVRGREVSPSDVREDSNLESSQLTVQAEFDMSAIPRKRGRPRKINPSEDVGSKAVKEERSPKKKEAPSIRRRSTRNTPAKSENVDVGKPALGKSILVPNEELSMVMSSKKKLTKKTESQSQKRSLHSVSEERTDEMTHKETNEQEERLLATASFTKSSRSSRTRSSKAILLPDLSEPNNEPLFSPASEVPRKAKAKKIEVPAQLKELVSDLSSQFVISPPALRSRQKNTSNKNKLEDELKDDAQSVETLGKPKAKRIRTSKTKQASKNTEKESAWSPPPIEIRLISPLASPADGVKSKPRKTTEVTGTGLGRNRKKLSSYPKQILRRKML

SEQ ID NO: 68614 - protein, 17 aa, Homo sapiens
LWAPGMVLPVLCAAFTH

SEQ ID NO: 68615 - protein, 9 aa, Homo sapiens
KWMVCLFAV

SEQ ID NO: 68616 - protein, 518 aa, Homo sapiens
LVAFHLGLLFVWLCQRFSRALMAAKRSSGAAPAPASASAPAPVPGGEAERVRVFHKQAFEYISIALRIDEDEKGQKEQAVEWYKKGIEELEKGIAVIVTGQGEQCERARRLQAKMMTNLVMAKDRLQLLESGAVPKRKDPLTHTSNSLPRSKTVMKTGSAGLSGHHRAPSYSGLSMVSGVKQGSGPAPTTHKGTPKTNRTNKPSTPTTATRKKKDLKNFRNVDSNLANLIMNEIVDNGTAVKFDDIAGQDLAKQALQEIVILPSLRPELFTGLRAPARGLLLFGPPGNGKTMLAKAVAAESNATFFNISAASLTSKYVGEGEKLVRALFAVARELQPSIIFIDEVDSLLCERREGEHDASRRLKTEFLIEFDGVQSAGDDRVLVMGATNRPQELDEAVLRRFIKRVYVSLPNEETRLLLLKNLLCKQGSPLTQKELAQLARMTDGYSGSDLTALAKDAALGPIRELKPEQVKNMSASEMRNIRLSDFTESLKKIKRSVSPQTLEAYIRWNKDFGDTTV

SEQ ID NO: 68617 - protein, 17 aa, Homo sapiens
MLYPLTLRMLFAEVTFL

SEQ ID NO: 68618 - protein, 9 aa, Homo sapiens
LWLWLGLML

SEQ ID NO: 68619 - protein, 276 aa, Homo sapiens
IILIYLFLLLWEDTQGWGFKDGIFHNSIWLERAAGVYHREARSGKYKLTYAEAKAVCEFEGGHLATYKQLEAARKIGFHVCAAGWMAKGRVGYPIVKPGPNCGFGKTGIIDYGIRLNRSERWDAYCYNPHAKECGGVFTDPKQIFKSPGFPNEYEDNQICYWHIRLKYGQRIHLSFLDFDLEDDPGCLADYVEIYDSYDDVHGFVGRYCGDELPDDIISTGNVMTLKFLSDASVTAGGFQIKYVAMDPVSKSSQGKNTSTTSTGNKNFLAGRFSHL

SEQ ID NO: 68620 - protein, 77 aa, Homo sapiens
MASSLGLYAAVVQLSWSWEAWWQAARDMEKGFCGWLCSKLGLEDCSPYSIVELLESDNISSTLSNKDPIQEVETSTV

SEQ ID NO: 68621 - protein, 53 aa, Homo sapiens
IFTLFLAFQVVAAFLTLRKMVNQLAVRFHLQDFDRLSANRGDMRRMRSCIEEI

SEQ ID NO: 68622 - protein, 41 aa, Homo sapiens
LPALFCFKLFVLWSRGAVHTFVDDAKRNHPTKFCLWKVTMK

SEQ ID NO: 68623 - protein, 29 aa, Homo sapiens
KGAHSVGLMWWMLAREVLRMRGTISREHP

SEQ ID NO: 68624 - protein, 894 aa, Homo sapiens
RMSVGLSLLLPLSGRTFLLLLSVVMAQSHWPSEPSEAVRDWENQLEASMHSVLSDLHEAVPTVVGIPDGTAVVGRSFRVTIPTDLIASSGDIIKVSAAGKEALPSWLHWDSQSHTLEGLPLDTDKGVHYISVSATRLGANGSHIPQTSSVFSIEVYPEDHSELQSVRTASPDPGEVVSSACAADEPVTVLTVILDADLTKMTPKQRIDLLHRMRSFSEVELHNMKLVPVVNNRLFDMSAFMAGPGNAKKVVENGALLSWKLGCSLNQNSVPDIHGVEAPAREGAMSAQLGYPVVGWHIANKKPPLPKRVRRQIHATPTPVTAIGPPTTAIQEPPSRIVPTPTSPAIAPPTETMAPPVRDPVPGKPTVTIRTRGAIIQTPTLGPIQPTRVSEAGTTVPGQIRPTMTIPGYVEPTAVATPPTTTTKKPRVSTPKPATPSTDSTTTTTRRPTKKPRTPRPVPRVTTKVSITRLETASPPTRIRTTTSGVPRGGEPNQRPELKNHIDRVDAWVGTYFEVKIPSDTFYDHEDTTTDKLKLTLKLREQQLVGEKSWVQFNSNSQLMYGLPDSSHVGKHEYFMHATDKGGLSAVDAFEIHVHRRPQGDRAPARFKAKFVGDPALVLNDIHKKIALVKKLAFAFGDRNCSTITLQNITRGSIVVEWTNNTLPLEPCPKEQIAGLSRRIAEDDGKPRPAFSNALEPDFKATSITVTGSGSCRHLQFIPVVPPRRVPSEAPPTEVPDRDPEKSSEDDVYLHTVIPAVVVAAILLIAGIIAMICYRKKRKGKLTLEDQATFIKKGVPIIFADELDDSKPPPSSSMPLILQEEKAPLPPPEYPNQSVPETTPLNQDTMGEYTPLRDEDPNAPPYQPPPPFTAPMEGKGSRPKNMTPYRSPPPYVPP

SEQ ID NO: 68625 - protein, 608 aa, Homo sapiens
IVVTVTLALGVMRMVKKRAIVKKLPIVETLGCCNVICSDKTGTLTKNEMTVTHIFTSDGLHAEVTGVGYNQFGEVIVDGDVVHGFYNPAVSRIVEAGCVCNDAVIRNNTLMGKPTEGALIALAMKMGLDGLQQDYIRKAEYPFSSEQKWMAVKCVHRTQQDRPEICFMKGAYEQVIKYCTTYQSKGQTLTLTQQQRDVYQQEKARMGSAGLRVLALASGPELGQLTFLGLVGIIDPPRTGVKEAVTTLIASGVSIKMITGDSQETAVAIASRLGLYSKTSQSVSGEEIDAMDVQQLSQIVPKVAVFYRASPRHKMKIIKSLQKNGSVVAMTGDGVNDAVALKAADIGVAMGQTGTDVCKEAADMILVDDDFQTIMSAIEEGKGIYNNIKNFVRFQLSTSIAALTLISLATLMNFPNPLNAMQILWINIIMDGPPAQSLGVEPVDKDVIRKPPRNWKDSILTKNLILKILVSSIIIVCGTLFVFWRELRDNVITPRDTTMTFTCFVFFDMFNALSSRSQTKSVFEIGLCSNRMFCYAVLGSIMGQLLVIYFPPLQKVFQTESLSILDLLFLLGLTSSVCIVAEIIKKVERSREKIQKHVSSTSSSFLEV

SEQ ID NO: 68626 - protein, 20 aa, Homo sapiens
IEVLLFFLMPWLCEFESKQL

SEQ ID NO: 68627 - protein, 36 aa, Homo sapiens
IVMIARCLSFSFILTVCRGYMMCDDILIDVNEWCYT

SEQ ID NO: 68628 - protein, 21 aa, Homo sapiens
RARSGLMALTLAAIGQPGALS

SEQ ID NO: 68629 - protein, 329 aa, Homo sapiens
LLLLTLCLTVVGWATSNYFVGAIQEIPKAKEFMANFHKTLILGKGKTLTNEASTKKVELDNCPSVSPYLRGQSKLIFKPDLTLEEVQAENPKVSRGRYRPQECKALQRVAILVPHRNREKHLMYLLEHLHPFLQRQQLDYGIYVIHQAEGKKFNRAKLLNVGYLEALKEENWDCFIFHDVDLVPENDFNLYKCEEHPKHLVVGRNSTGYRLRYSGYFGGVTALSREQFFKVNGFSNNYWGWGGEDDDLRLRVELQRMKISRPLPEVGKYTMVFHTRDKGNEVNAERMKLLHQVSRVWRTDGLSSCSYKLVSVEHNPLYINITVDFWFGA

SEQ ID NO: 68630 - protein, 164 aa, Homo sapiens
VWINAFVMLTTQLLPSKYCDLLHKSAAHLGKWQKLEHGSYSNAPQHIWSENTIWPQGVLVRHSRCLYRAMGPYNVAVPSDVSHARFYFLFHRPLRLLNLLILIEGSVVFYQLYSLLRSEKWNHTLSMALILFCNYYVLFKLLRDRIVLGRAYSYPLNSYELKAN

SEQ ID NO: 68631 - protein, 18 aa, Homo sapiens
LLLLFTLLLGFYEGFVKS

SEQ ID NO: 68632 - protein, 969 aa, Homo sapiens
IEVLGIAVFLRGFFPAPVRSSARAEHGAEPPAPEPSAGASSNWTTLPPPLFSKVVIVLIDALRDDFVFGSKGVKFMPYTTYLVEKGASHSFVAEAKPPTVTMPRIKALMTGSLPGFVDVIRNLNSPALLEDSVIRQAKAAGKRIVFYGDETWVKLFPKHFVEYDGTTSFFVSDYTEVDNNVTRHLDKVLKRGDWDILILHYLGLDHIGHISGPNSPLIGQKLSEMDSVLMKIHTSLQSKERETPLPNLLVLCGDHGMSETGSHGASSTEEVNTPLILISSAFERKPGDIRHPKHVQQTDVAATLAIALGLPIPKDSVGSLLFPVVEGRPMREQLRFLHLNTVQLSKLLQENVPSYEKDPGFEQFKMSERLHGNWIRLYLEEKHSEVLFNLGSKVLRQYLDALKTLSLSLSAQVAQYDIYSMMVGTVVVLEVLTLLLLSVPQALRRKAELEVPLSSPGFSLLFYLVILVLSAVHVIVCTSAESSCYFCGLSWLAAGGVMVLASALLCVIVSVLTNVLVGGNTPRKNPMHPSSRWSELDLLILLGTAGHVLSLGASSFVEEEHQTWYFLVNTLCLALSQETYRNYFLGDDGEPPCGLCVEQGHDGATAAWQDGPGCDVLERDKGHGSPSTSEVLRGREKWMVLASPWLILACCRLLRSLNQTGVQWAHRPDLGHWLTSSDHKAELSVLAALSLLVVFVLVQRGCSPVSKAALALGLLGVYCYRAAIGSVRFPWRPDSKDISKGIIEARFVYVFVLGILFTGTKDLLKSQVIAADFKLKTVGLWEIYSGLVLLAALLFRPHNLPVLAFSLLIQTLMTKFIWKPLRHDAAEITVMHYWFGQAFFYFQGNSNNIATVDISAGFVGLDTYVEIPAVLLTAFGTYAGPVLWASHLVHFLSSETRSGSALSHACFCYALICSIPVFTYIVLVTSLRYHLFIWSVFSPKLLYEGMHLLITAAVCVFFTAMDQTRLTQS

SEQ ID NO: 68633 - protein, 30 aa, Homo sapiens
LLSIIATVMILPVTHTEISPEQWTKAAPWK

SEQ ID NO: 68634 - protein, 417 aa, Homo sapiens
KADIWALGCLLYKLCFFTLPFGESQVAICDGNFTIPDNSRYSRNIHCLIRFMLEPDPEHRPDIFQVSYFAFKFAKKDCPVSNINNSSIPSALPEPMTASEAAARKSQIKARITDTIGPTETSIAPRQRPKANSATTATPSVLTIQSSATPVKVLAPGEFGNHRPKGALRPGNGPEILLGQGPPQQPPQQHRVLQQLQQGDWRLQQLHLQHRHPHQQQQQQQQQQQQQQQQQQQQQQQQQQQHHHHHHHHLLQDAYMQQYQHATQQQQMLQQQFLMHSVYQPQPSASQYPTMMPQYQQAFFQQQMLAQHQPSQQQASPEYLTSPQEFSPALVSYTSSLPAQVGTIMDSSYSANRSVADKEAIANFTNQKNISNPPDMSGWNPFGEDNFSKLTEEELLDREFDLLRSSKGHLKAYFASQ

SEQ ID NO: 68635 - protein, 981 aa, Homo sapiens
IAATAMRGARGAWDFLCVLLLLLRVQTGSSQPSVSPGEPSPPSIHPGKSDLIVRVGDEIRLLCTDPGFVKWTFEILDETNENKQNEWITEKAEATNTGKYTCTNKHGLSNSIYVFVRDPAKLFLVDRSLYGKEDNDTLVRCPLTDPEVTNYSLKGCQGKPLPKDLRFIPDPKAGIMIKSVKRAYHRLCLHCSVDQEGKSVLSEKFILKVRPAFKAVPVVSVSKASYLLREGEEFTVTCTIKDVSSSVYSTWKRENSQTKLQEKYNSWHHGDFNYERQATLTISSARVNDSGVFMCYANNTFGSANVTTTLEVVDKGFINIFPMINTTVFVNDGENVDLIVEYEAFPKPEHQQWIYMNRTFTDKWEDYPKSENESNIRYVSELHLTRLKGTEGGTYTFLVSNSDVNAAIAFNVYVNTKPEILTYDRLVNGMLQCVAAGFPEPTIDWYFCPGTEQRCSASVLPVDVQTLNSSGPPFGKLVVQSSIDSSAFKHNGTVECKAYNDVGKTSAYFNFAFKGNNKEQIHPHTLFTPLLIGFVIVAGMMCIIVMILTYKYLQKPMYEVQWKVVEEINGNNYVYIDPTQLPYDHKWEFPRNRLSFGKTLGAGAFGKVVEATAYGLIKSDAAMTVAVKMLKPSAHLTEREALMSELKVLSYLGNHMNIVNLLGACTIGGPTLVITEYCCYGDLLNFLRRKRDSFICSKQEDHAEAALYKNLLHSKESSCSDSTNEYMDMKPGVSYVVPTKADKRRSVRIGSYIERDVTPAIMEDDELALDLEDLLSFSYQVAKGMAFLASKNCIHRDLAARNILLTHGRITKICDFGLARDIKNDSNYVVKGNARLPVKWMAPESIFNCVYTFESDVWSYGIFLWELFSLGSSPYPGMPVDSKFYKMIKEGFRMLSPEHAPAEMYDIMKTCWDADPLKRPTFKQIVQLIEKQISESTNHIYSNLANCSPNRQKPVVDHSVRINSVGSTASSSQPLLVHDDV

SEQ ID NO: 68636 - protein, 310 aa, Homo sapiens
VICFCLLGITCAIPVKQADSGSSEEKQLYNKYPDAVATWLNPDPSQKQNLLAPQNAVSSEETNDFKQETLPSKSNESHDHMDDMDDEDDDDHVDSQDSIDSNDSDDVDDTDDSHQSDESHHSDESDELVTDFPTDLPATEVFTPVVPTVDTYDGRGDSVVYGLRSKSKKFRRPDIQYPDATDEDITSHMESEELNGAYKAIPVAQDLNAPSDWDSRGKDSYETSQLDDQSAETHSHKQSRLYKRKANDESNEHSDVIDSQELSKVSREFHSHEFHSHEDMLVVDPKSKEEDKHLKFRISHELDSASSEVN

SEQ ID NO: 68637 - protein, 10 aa, Homo sapiens
ICLQVAVLII

SEQ ID NO: 68638 - protein, 29 aa, Homo sapiens
IIDATRVNMLYILMIALGHRSLKAQMDGI

SEQ ID NO: 68639 - protein, 40 aa, Homo sapiens
IQKAKRLTWRASFHLTLTLFLMKKLNPVQKHLHLQHPQPK

SEQ ID NO: 68640 - protein, 1073 aa, Homo sapiens
KGTCVIAWLFSSLGLWRLAHPEAQGTTQCQRTEHPVISYKEIGPWLREFRAKNAVDFSQLTFDPGQKELVVGARNYLFRLQLEDLSLIQAVEWECDEATKKACYSKGKSKEECQNYIRVLLVGGDRLFTCGTNAFTPVCTNRSLSNLTEIHDQISGMARCPYSPQHNSTALLTAGGELYAATAMDFPGRDPAIYRSLGILPPLRTAQYNSKWLNEPNFVSSYDIGNFTYFFFRENAVEHDCGKTVFSRAARVCKNDIGGRFLLEDTWTTFMKARLNCSRPGEVPFYYNELQSTFFLPELDLIYGIFTTNVNSIAASAVCVFNLSAIAQAFSGPFKYQENSRSAWLPYPNPNPHFQCGTVDQGLYVNLTERNLQDAQKFILMHEVVQPVTTVPSFMEDNSRFSHVAVDVVQGREALVHIIYLATDYGTIKKVRVPLNQTSSSCLLEEIELFPERRREPIRSLQILHSQSVLFVGLREHVVKIPLKRCQFYRTRSTCIGAQDPYCGWDVVMKKCTSLEESLSMTQWEQSISACPTRNLTVDGHFGVWSPWTPCTHTDGSAVGSCLCRTRSCDSPAPQCGGWQCEGPGMEIANCSRNGGWTPWTSWSPCSTTCGIGFQVRQRSCSNPTPRHGGRVCVGQNREERYCNEHLLCPPHMFWTGWGPWERCTAQCGGGIQARRRICENGPDCAGCNVEYQSCNTNPCPELKKTTPWTPWTPVNISDNGGHYEQRFRYTCKARLADPNLLEVGRQRIEMRYCSSDGTSGCSTDGLSGDFLRAGRYSAHTVNGAWSAWTSWSQCSRDCSRGIRNRKRVCNNPEPKYGGMPCLGPSLEYQECNILPCPVDGVWSCWSPWTKCSATCGGGHYMRTRSCSNPAPAYGGDICLGLHTEEALCNTQPCPESWSEWSDWSECEASGVQVRARQCILLFPMGSQCSGNTTESRPCVFDSNFIPEVSVARSSSVEEKRCGEFNMFHMIAVGLSSSILGCLLTLLVYTYCQRYQQQSHDATVIHPVSPAPLNTSITNHINKLDKYDSVEAIKAFNKNNLILEERNKYFNPHLTGKTYSNAYFTDLNNYDEY

SEQ ID NO: 68641 - protein, 159 aa, Homo sapiens
VVILCIATYFSLGTRCLNLLGFQQFMGDDDMTSDLVNEGKELIRKEKRKRQRQEEGENRRREWKERYGHNREDSTRNRNIHTDPKESNFSDVNTNRSAFKYTRANNRTERDRIELLQDAEPLDFNAETFTDDPLESESGRYQPGGRYLSMSRSDIFNDV

SEQ ID NO: 68642 - protein, 915 aa, Homo sapiens
LQTWLVQALFIFLTTESTGELLDPCGYISPESPVVQLHSNFTAVCVLKEKCMDYFHVNANYIVWKTNHFTIPKEQYTIINRTASSVTFTDIASLNIQLTCNILTFGQLEQNVYGITIISGLPPEKPKNLSCIVNEGKKMRCEWDGGRETHLETNFTLKSEWATHKFADCKAKRDTPTSCTVDYSTVYFVNIEVWVEAENALGKVTSDHINFDPVYKVKPNPPHNLSVINSEELSSILKLTWTNPSIKSVIILKYNIQYRTKDASTWSQIPPEDTASTRSSFTVQDLKPFTEYVFRIRCMKEDGKGYWSDWSEEASGITYEDRPSKAPSFWYKIDPSHTQGYRTVQLVWKTLPPFEANGKILDYEVTLTRWKSHLQNYTVNATKLTVNLTNDRYLATLTVRNLVGKSDAAVLTIPACDFQATHPVMDLKAFPKDNMLWVEWTTPRESVKKYILEWCVLSDKAPCITDWQQEDGTVHRTYLRGNLAESKCYLITVTPVYADGPGSPESIKAYLKQAPPSKGPTVRTKKVGKNEAVLEWDQLPVDVQNGFIRNYTIFYRTIIGNETAVNVDSSHTEYTLSSLTSDTLYMVRMAAYTDEGGKDGPEFTFTTPKFAQGEIEAIVVPVCLAFLLTTLLGVLFCFNKRDLIKKHIWPNVPDPSKSHIAQWSPHTPPRHNFNSKDQMYSDGNFTDVSVVEIEANDKKPFPEDLKSLDLFKKEKINTEGHSSGIGGSSCMSSSRPSISSSDENESSQNTSSTVQYSTVVHSGYRHQVPSVQVFSRSESTQPLLDSEERPEDLQLVDHVDGGDGILPRQQYFKQNCSQHESSPDISHFERSKQVSSVNEEDFVRLKQQISDHISQSCGSGQMKMFQEVSAADAFGPGTEGQVERFETVGMEAATDEGMPKSYLPQTVRQGGYMPQ

SEQ ID NO: 68643 - protein, 18 aa, Homo sapiens
LCGPAGLLLWVCRLLSLL

SEQ ID NO: 68644 - protein, 539 aa, Homo sapiens
TLLLFCLCAFLSLSWYAALSGQKGDVVDVYQREFLALRDRLHAAEQESLKRSKELNLVLDEIKRAVSERQALRDGDGNRTWGRLTEDPRLKPWNGSHRHVLHLPTVFHHLPHLLAKESSLQPAVRVGQGRTGVSVVMGIPSVRREVHSYLTDTLHSLISELSPQEKEDSVIVVLIAETDSQYTSAVTENIKALFPTEIHSGLLEVISPSPHFYPDFSRLRESFGDPKERVRWRTKQNLDYCFLMMYAQSKGIYYVQLEDDIVAKPNYLSTMKNFALQQPSEDWMILEFSQLGFIGKMFKSLDLSLIVEFILMFYRDKPIDWLLDHILWVKVCNPEKDAKHCDRQKANLRIRFKPSLFQHVGTHSSLAGKIQKLKDKDFGKQALRKEHVNPPAEVSTSLKTYQHFTLEKAYLREDFFWAFTPAAGDFIRFRFFQPLRLERFFFRSGNIEHPEDKLFNTSVEVLPFDNPQSDKEALQEGRTATLRYPRSPDGYLQIGSFYKGVAEGEVDPAFGPLEALRLSIQTDSPVWVILSEIFLKKAD

SEQ ID NO: 68645 - protein, 20 aa, Homo sapiens
ILTFLVVCILGSLLCSSRET

SEQ ID NO: 68646 - protein, 296 aa, Homo sapiens
KRIMGSRAELCTLLGGFSFLLLLIPGEGAKGGSLRESQGVCSKQTLVVPLHYNESYSQPVYKPYLTLCAGRRICSTYRTMYRVMWREVRREVQQTHAVCCQGWKKRHPGALTCEAICAKPCLNGGVCVRPDQCECAPGWGGKHCHVDVDECRTSITLCSHHCFNTAGSFTCGCPHDLVLGVDGRTCMEGSPEPPTSASILSVAVREAEKDERALKQEIHELRGRLERLEQWAGQAGAWVRAVLPVPPEELQPEQVAELWGRGDRIESLSDQVLLLEERLGACSCEDNSLGLGVNHR

SEQ ID NO: 68647 - protein, 451 aa, Homo sapiens
LALFILFIFSLMMGLKMLRPNTATFGAPFGLDLLPELHQRTIHLGKNFDFQKSDRINSETNTKNLKSVEITMKPSKASELNLDELPPLNNYLHVFYYSWYGNPQFDGKYIHWNHPVLEHWDPRIAKNYPQGRHNPPDDIGSSFYPELGSYSSRDPSVIETHMRQMRSASIGVLALSWYPPDVNDENGEPTDNLVPTILDKAHKYNLKVTFHIEPYSNRDDQNMYKNVKYIIDKYGNHPAFYRYKTKTGNALPMFYVYDSYITKPEKWANLLTTSGSRSIRNSPYDGLFIALLVEEKHKYDILQSGFDGIYTYFATNGFTYGSSHQNWASLKLFCDKYNLIFIPSVGPGYIDTSIRPWNTQNTRNRINGKYYEIGLSAALQTRPSLISITSFNEWHEGTQIEKAVPKRTSNTVYLDYRPHKPGLYLELTRKWSEKYSKERATYALDRQLPVS

SEQ ID NO: 68648 - protein, 501 aa, Homo sapiens
LSLLLAVALGLATAVSAGPAVIECWFVEDASGKGLAKRPGALLLRQGPGEPPPRPDLDPELYLSVHDPAGALQAAFRRYPRGAPAPHCEMSRFVPLPASAKWASGLTPAQNCPRALDGAWLMVSISSPVLSLSSLLRPQPEPQQEPVLITMATVVLTVLTHTPAPRVRLGQDALLDLSFAYMPPTSEAASSLAPGPPPFGLEWRRQHLGKGHLLLAATPGLNGQMPAAQEGAVAFAAWDDDEPWGPWTGNGTFWLPTVQPFQEGTYLATIHLPYLQGQVTLELAVYKPPKVSLMPATLARAAPGEAPPELLCLVSHFYPSGGLEVEWELRGGPGGRSQKAEGQRWLSALRHHSDGSVSLSGHLQPPPVTTEQHGARYACRIHHPSLPASGRSAEVTLEVAGLSGPSLEDSVGLFLSAFLLLGLFKALGWAAVYLSTCKDSKKVQCSTSLYLSLVTLSPHPISKPMEGGCWCGRQNLGLEFTLIWVKTWHYILTVGLFEHAT

SEQ ID NO: 68649 - protein, 42 aa, Homo sapiens
LPASWHLSLLLAPLCLASACILSVLRPLGVPCWPGSCVLRTR

SEQ ID NO: 68650 - protein, 322 aa, Homo sapiens
TRKDLIIMDLRQFLMCLSLCTAFALSKPTEKKDRVHHEPQLSDKVHNDAQSFDYDHDAFLGAEEAKTFDQLTPEESKERLGKIVSKIDGDKDGFVTVDELKDWIKFAQKRWIYEDVERQWKGHDLNEDGLVSWEEYKNATYGYVLDDPDPDDGFNYKQMMVRDERRFKMADKDGDLIATKEEFTAFLHPEEYDYMKDIVVQETMEDIDKNADGFIDLEEYIGDMYSHDGNTDEPEWVKTEREQFVEFRDKNRDGKMDKEETKDWILPSDYDHAEAEARHLVYESDQNKDGKLTKEEIVDKYDLFVGSQATDFGEALVRHDEF

SEQ ID NO: 68651 - protein, 29 aa, Homo sapiens
VTRFTMMLRVLIMTMMPSWVLKKQRPLIS

SEQ ID NO: 68652 - protein, 236 aa, Homo sapiens
VTVLFSVLACLLVLALAWVSTHTAEGGDPLPQPSGTPTPSQPSAAMAATDSMRGEAPGAETPSLRHRGQAAQPEPSTGFTATPPAPDSPQEPLVLRLKFLNDSEQVARAWPHDTIGSLKRTQFPGREQQVRLIYQGQLLGDDTQTLGSLHLPPNCVLHCHVSTRVGPPNPPCPPGSEPGPSGLEIGSLLLPLLLLLLLLLWYCQIQYRPFFPLTATLGLAGFTLLLSLLAFAMYRP

SEQ ID NO: 68653 - protein, 1781 aa, Homo sapiens
LLAFSFLALCRARVRAQEPEFSYGCAEGSCYPATGDLLIGRAQKLSVTSTCGLHKPEPYCIVSHLQEDKKCFICNSQDPYHETLNPDSHLIENVVTTFAPNRLKIWWQSENGVENVTIQLDLEAEFHFTHLIMTFKTFRPAAMLIERSSDFGKTWGVYRYFAYDCEASFPGISTGPMKKVDDIICDSRYSDIEPSTEGEVIFRALDPAFKIEDPYSPRIQNLLKITNLRIKFVKLHTLGDNLLDSRMEIREKYYYAVYDMVVRGNCFCYGHASECAPVDGFNEEVEGMVHGHCMCRHNTKGLNCELCMDFYHDLPWRPAEGRNSNACKKCNCNEHSISCHFDMAVYLATGNVSGGVCDDCQHNTMGRNCEQCKPFYYQHPERDIRDPNFCERCTCDPAGSQNEGICDSYTDFSTGLIAGQCRCKLNVEGEHCDVCKEGFYDLSSEDPFGCKSCACNPLGTIPGGNPCDSETGHCYCKRLVTGQHCDQCLPEHWGLSNDLDGCRPCDCDLGGALNNSCFAESGQCSCRPHMIGRQCNEVEPGYYFATLDHYLYEAEEANLGPGVSIVERQYIQDRIPSWTGAGFVRVPEGAYLEFFIDNIPYSMEYDILIRYEPQLPDHWEKAVITVQRPGRIPTSSRCGNTIPDDDNQVVSLSPGSRYVVLPRPVCFEKGTNYTVRLELPQYTSSDSDVESPYTLIDSLVLMPYCKSLDIFTVGGSGDGVVTNSAWETFQRYRCLENSRSVVKTPMTDVCRNIIFSISALLHQTGLACECDPQGSLSSVCDPNGGQCQCRPNVVGRTCNRCAPGTFGFGPSGCKPCECHLQGSVNAFCNPVTGQCHCFQGVYARQCDRCLPGHWGFPSCQPCQCNGHADDCDPVTGECLNCQDYTMGHNCERCLAGYYGDPIIGSGDHCRPCPCPDGPDSGRQFARSCYQDPVTLQLACVCDPGYIGSRCDDCASGYFGNPSEVGGSCQPCQCHNNIDTTDPEACDKETGRCLKCLYHTEGEHCQFCRFGYYGDALQQDCRKCVCNYLGTVQEHCNGSDCQCDKATGQCLCLPNVIGQNCDRCAPNTWQLASGTGCDPCNCNAAHSFGPSCNEFTGQCQCMPGFGGRTCSECQELFWGDPDVECRACDCDPRGIETPQCDQSTGQCVCVEGVEGPRCDKCTRGYSGVFPDCTPCHQCFALWDVIIAELTNRTHRFLEKAKALKISGVIGPYRETVDSVERKVSEIKDILAQSPAAEPLKNIGNLFEEAEKLIKDVTEMMAQVEVKLSDTTSQSNSTAKELDSLQTEAESLDNTVKELAEQLEFIKNSDIRGALDSITKYFQMSLEAEERVNASTTEPNSTVEQSALMRDRVEDVMMERESQFKEKQEEQARLLDELAGKLQSLDLSAAAEMTCGTPPGASCSETECGGPNCRTDEGERKCGGPGCGGLVTVAHNAWQKAMDLDQDVLSALAEVEQLSKMVSEAKLRADEAKQSAEDILLKTNATKEKMDKSNEELRNLIKQIRNFLTQDSADLDSIEAVANEVLKMEMPSTPQQLQNLTEDIRERVESLSQVEVILQHSAADIARAEMLLEEAKRASKSATDVKVTADMVKEALEEAEKAQVAAEKAIKQADEDIQGTQNLLTSIESETAASEETLFNASQRISELERNVEELKRKAAQNSGEAEYIEKVVYTVKQSAEDVKKTLDGELDEKYKKVENLIAKKTEESADARRKAEMLQNEAKTLLAQANSKLQLLKDLERKYEDNQRYLEDKAQELARLEGEVRSLLKDISQKVAVYSTCL

SEQ ID NO: 68654 - protein, 1300 aa, Homo sapiens
IMPKKKRLSAGRVPLILFLCQMISALEVPLDPKLLEDLVQPPTITQQSPKDYIIDPRENIVIQCEAKGKPPPSFSWTRNGTHFDIDKDPLVTMKPGTGTLIINIMSEGKAETYEGVYQCTARNERGAAVSNNIVVRPSRSPLWTKEKLEPITLQSGQSLVLPCRPPIGLPPPIIFWMDNSFQRLPQSERVSQGLNGDLYFSNVLPEDTREDYICYARFNHTQTIQQKQPISVKVISVDELNDTIAANLSDTEFYGAKSSRERPPTFLTPEGNASNKEELRGNVLSLECIAEGLPTPIIYWAKEDGMLPKNRTVYKNFEKTLQIIHVSEADSGNYQCIAKNALGAIHHTISVRVKAAPYWITAPQNLVLSPGEDGTLICRANGNPKPRISWLTNGVPIEIAPDDPSRKIDGDTIIFSNVQERSSAVYQCNASNEYGYLLANAFVNVLAEPPRILTPANTLYQVIANRPALLDCAFFGSPLPTIEWFKGAKGSALHEDIYVLHENGTLEIPVAQKDSTGTYTCVARNKLGMAKNEVHLEIKDPTWIVKQPEYAVVQRGSMVSFECKVKHDHTLSLTVLWLKDNRELPSDERFTVDKDHLVVADVSDDDSGTYTCVANTTLDSVSASAVLSVVAPTPTPAPVYDVPNPPFDLELTDQLDKSVQLSWTPGDDNNSPITKFIIEYEDAMHKPGLWHHQTEVSGTQTTAQLKLSPYVNYSFRVMAVNSIGKSLPSEASEQYLTKASEPDKNPTAVEGLGSEPDNLVITWKPLNGFESNGPGLQYKVSWRQKDGDDEWTSVVVANVSKYIVSGTPTFVPYLIKVQALNDMGFAPEPAVVMGHSGEDLPMVAPGNVRVNVVNSTLAEVHWDPVPLKSIRGHLQGYRIYYWKTQSSSKRNRRHIEKKILTFQGSKTHGMLPGLEPFSHYTLNVRVVNGKGEGPASPDRVFNTPEGVPSAPSSLKIVNPTLDSLTLEWDPPSHPNGILTEYTLKYQPINSTHELGPLVDLKIPANKTRWTLKNLNFSTRYKFYFYAQTSAGSGSQITEEAVTTVDEAGILPPDVGAGKVQAVNPRISNLTAAAAETYANISWEYEGPEHVNFYVEYGVAGSKEEWRKEIVNGSRSFFGLKGLMPGTAYKVRVGAVGDSGFVSSEDVFETGPAMASRQVDIATQGWFIGLMCAVALLILILLIVCFIRRNKGGKYPVKEKEDAHADPEIQPMKEDDGTFGEYSDAEDHKPLKKGSRTPSDRTVKKEDSDDSLVDYGEGVNGQFNEDGSFIGQYSGKKEKEPAEGNESSEAPSPVNAMNSFV

SEQ ID NO: 68655 - protein, 470 aa, Homo sapiens
LLVLTLAVWLQSLTASRGGVAAADQRRDFIDIESKFALRTPEDTAEDTCHLIPGVAESVATCHFNHSSKTFMVIHGWTVTGMYESWVPKLVAALYKREPDSNVIVVDWLSRAQEHYPVSAGYTKLVGQDVARFINWMEEEFNYPLDNVHLLGYSLGAHAAGIAGSLTNKKVNRITGLDPAGPNFEYAEAPSRLSPDDADFVDVLHTFTRGSPGRSIGIQKPVGHVDIYPNGGTFQPGCNIGEAIRVIAERGLGDVDQLVKCSHERSIHLFIDSLLNEENPSKAYRCSSKEAFEKGLCLSCRKNRCNNLGYEINKVRAKRSSKMYLKTRSQMPYKVFHYQVKIHFSGTESETHTNQAFEISLYGTVAESENIPFTLPEVSTNKTYSFLIYTEVDIGELLMLKLKWKSDSYFSWSDWWSSPGFAIQKIRVKAGETQKKVIFCSREKVSHLQKGKAPAVFVKCHDKSLNKKSG

SEQ ID NO: 68656 - protein, 20 aa, Homo sapiens
RKTVYLLLLMIVRTTSFLLL

SEQ ID NO: 68657 - protein, 127 aa, Homo sapiens
VPTSRCRFLLARVLGYLVVMEAVLTEELDEEEQLLRRHRKEKKELQAKIQGMKNAVPKNDKKRRKQLTEDVAKLEKEMEQKHREELEQLKLTTKENKIDSVAVNISNLVLENQPPRISKAQKRRVPG

SEQ ID NO: 68658 - protein, 35 aa, Homo sapiens
RSQLWLGCWQVLAGLAGIAVDCLRGAAARSARGPA

SEQ ID NO: 68659 - protein, 30 aa, Homo sapiens
IIVIIGAMWREFIIHPLLLATVLDSEDCCI

SEQ ID NO: 68660 - protein, 36 aa, Homo sapiens
ILALCLLVLVYTVFQFKRKGTPRHILYCKRSMQEWV

SEQ ID NO: 68661 - protein, 15 aa, Homo sapiens
MLQELALLLLKLVAC

SEQ ID NO: 68662 - protein, 37 aa, Homo sapiens
TLLYACYWVMLLTLYVVLINKCGRRKKGQQYDMVLDV

SEQ ID NO: 68663 - protein, 56 aa, Homo sapiens
VLLDLLLIQIWTIFVSCFEVQVILANQVPKDHPTIPRAISRECLSTNPSSVWSLVD

SEQ ID NO: 68664 - protein, 40 aa, Homo sapiens
IAIIVAIVMCITRKCPKNNRGRRQKQNLGHFTSDTSSRMV

SEQ ID NO: 68665 - protein, 546 aa, Homo sapiens
LFCTLISSRMSAPKLLSLGCIFFPLLLFQQARAQFPRQCATVEALRSGMCCPDLSPVSGPGTDRCGSSSGRGRCEAVTADSRPHSPQYPHDGRDDREVWPLRFFNRTCHCNGNFSGHNCGTCRPGWRGAACDQRVLIVRRNLLDLSKEEKNHFVRALDMAKRTTHPLFVIATRRSEEILGPDGNTPQFENISIYNYFVWTHYYSVKKTFLGVGQESFGEVDFSHEGPAFLTWHRYHLLRLEKDMQEMLQEPSFSLPYWNFATGKNVCDICTDDLMGSRSNFDSTLISPNSVFSQWRVVCDSLEDYDTLGTLCNSTEDGPIRRNPAGNVARPMVQRLPEPQDVAQCLEVGLFDTPPFYSNSTNSFRNTVEGYSDPTGKYDPAVRSLHNLAHLFLNGTGGQTHLSPNDPIFVLLHTFTDAVFDEWLRRYNADISTFPLENAPIGHNRQYNMVPFWPPVTNTEMFVTAPDNLGYTYEIQWPSREFSVPEIIAIAVVGALLLVALIFGTASYLIRARRSMDEANQPLLTDQYQCYAEEYEKLQNPNQSVV

SEQ ID NO: 68666 - protein, 478 aa, Homo sapiens
IPRAALLPLLLLLLAAPASAQLSRAGRSAPLAAGCPDRCEPARCPPQPEHCEGGRARDACGCCEVCGAPEGAACGLQEGPCGEGLQCVVPFGVPASATVRRRAQAGLCVCASSEPVCGSDANTYANLCQLRAASRRSERLHRPPVIVLQRGACGQGQEDPNSLRHKYNFIADVVEKIAPAVVHIELFRKLPFSKREVPVASGSGFIVSEDGLIVTNAHVVTNKHRVKVELKNGATYEAKIKDVDEKADIALIKIDHQGKLPVLLLGRSSELRPGEFVVAIGSPFSLQNTVTTGIVSTTQRGGKELGLRNSDMDYIQTDAIINYGNSGGPLVNLDGEVIGINTLKVTAGISFAIPSDKIKKFLTESHDRQAKGKAITKKKYIGIRMMSLTSSKAKELKDRHRDFPDVISGAYIIEVIPDTPAEAGGLKENDVIISINGQSVVSANDVSDVIKRESTLNMVVRRGNEDIMITVIPEEIDP

SEQ ID NO: 68667 - protein, 70 aa, Homo sapiens
VFVGLAVFVIYKFKRKIPGINVYAQMQNEKEQEMISPVSHSESRPNVPQTELRRPGQLIDEKVESQLIGE

SEQ ID NO: 68668 - protein, 27 aa, Homo sapiens
LPFTSGGFLYIALVNVLPDLLEEEDPW

SEQ ID NO: 68669 - protein, 14 aa, Homo sapiens
ILGALWTLVIINQE

SEQ ID NO: 68670 - protein, 266 aa, Homo sapiens
LARPALLLLLPLLAPLLGTGAPAELRVRVRLPDGQVTEESLQADSDADSISLELRKPDGTLVSFTADFKKDVKVFRALILGELEKGQSQFQALCFVTQLQHNEIIPSEAMAKLRQKNPRAVRQAEEVRGLEHLHMDVAVNFSQGALLSPHLHNVCAEAVDAIYTRQEDVRFWLEQGVDSSVFEALPKASEQAELPRCRQVGDHGKPCVCRYGLSLAWYPCMLKYCHSRDRPTPYKCGIRSCQKSYSFDFYVPQRQLCLWDEDPYPG

SEQ ID NO: 68671 - protein, 31 aa, Homo sapiens
RAGCLALTLPALLLVTHQVPAEAAVSAPWRS

SEQ ID NO: 68672 - protein, 333 aa, Homo sapiens
LKLKNVFLAYFLVSIAGLLYALVQLGQPCDCLPPLRAAAEQLRQKDLRISQLQAELRRPPPAPAQPPEPEALPTIYVVTPTYARLVQKAELVRLSQTLSLVPRLHWLLVEDAEGPTPLVSGLLAASGLLFTHLVVLTPKAQRLREGEPGWVHPRGVEQRNKALDWLRGRGGAVGGEKDPPPPGTQGVVYFADDDNTYSRELFEEMRWTRGVSVWPVGLVGGLRFEGPQVQDGRVVGFHTAWEPSRPFPVDMAGFAVALPLLLDKPNAQFDSTAPRGHLESSLLSHLVDPKDLEPRAANCTRVLVWHTRTEKPKMKQEEQLQRQGRGSDPAIEV

SEQ ID NO: 68673 - protein, 248 aa, Homo sapiens
LLPLLLGFLLLSAPHGGSGLHTKGALPLDTVTFYKVIPKSKFVLVKFDTQYPYGEKQDEFKRLAENSASSDDLLVAEVGISDYGDKLNMELSEKYKLDKESYPVFYLFRDGDFENPVPYTGAVKVGAIQRWLKGQGVYLGMPGCLPVYDALAGEFIRASGVEARQALLKQGQDNLSSVKETQKKWAEQYLKIMGKILDQGEDFPASEMTRIARLIEKNKMSDGKKEELQKSLNILTAFQKKGAEKEEL

SEQ ID NO: 68674 - protein, 139 aa, Homo sapiens
VMTIIVAFILEAFVFRMNYSRKNQDSEVDGGITLEKEISKEELVAVLELYREARGASSDVTRLLETLSQMERYQQHSMVFLGRRSRTKSDLSLKMYQEEIQEWYEEHAREQEQQRQLSSSAAPAAQQPPGSRQRSQTVT

SEQ ID NO: 68675 - protein, 13 aa, Homo sapiens
ITGSMYIFCFGLV

SEQ ID NO: 68676 - protein, 445 aa, Homo sapiens
LPLVLLELLVGIYPSGVIGLVPHLGDREKRDSVCPQGKYIHPQNNSICCTKCHKGTYLYNDCPGPGQDTDCRECESGSFTASENHLRHCLSCSKCRKEMGQVEISSCTVDRDTVCGCRKNQYRHYWSENLFQCFNCSLCLNGTVHLSCQEKQNTVCTCHAGFFLRENECVSCSNCKKSLECTKLCLPQIENVKGTEDSGTTVLLPLVIFFGLCLLSLLFIGLMYRYQRWKSKLYSIVCGKSTPEKEGELEGTTTKPLAPNPSFSPTPGFTPTLGFSPVPSSTFTSSSTYTPGDCPNFAAPRREVAPPYQGADPILATALASDPIPNPLQKWEDSAHKPQSLDTDDPATLYAVVENVPPLRWKEFVRRLGLSDHEIDRLELQNGRCLREAQYSMLATWRRRTPRREATLELLGRVLRDMDLLGCLEDIEEALCGPAALPPAPSLLR

SEQ ID NO: 68677 - protein, 65 aa, Homo sapiens
VFLQKFPPWAVVEVVTVIVAAPAAATATTRDGGGCSRNCNIPEVFPELLGCPNRRGPPGGVRGAD

SEQ ID NO: 68678 - protein, 674 aa, Homo sapiens
LGRSFFWVLFPVLPWAVQAVEHEEVAQRVIKLHRGRGVAAMQSRQWVRDSCRKLSGLLRQKNAVLNKLKTAIGAVEKDVGLSDEEKLFQVHTFEIFQKELNESENSVFQAVYGLQRALQGDYKDVVNMKESSRQRLEALREAAIKEETEYMELLAAEKHQVEALKNMQHQNQSLSMLDEILEDVRKAADRLEEEIEEHAFDDNKSVKGVNFEAVLRVEEEEANSKQNITKREVEDDLGLSMLIDSQNNQYILTKPRDSTIPRADHHFIKDIVTIGMLSLPCGWLCTAIGLPTMFGYIICGVLLGPSGLNSIKSIVQVETLGEFGVFFTLFLVGLEFSPEKLRKVWKISLQGPCYMTLLMIAFGLLWGHLLRIKPTQSVFISTCLSLSSTPLVSRFLMGSARGDKEGDIDYSTVLLGMLVTQDVQLGLFMAVMPTLIQAGASASSSIVVEVLRILVLIGQILFSLAAVFLLCLVIKKYLIGPYYRKLHMESKGNKEILILGISAFIFLMLTVTELLDVSMELGCFLAGALVSSQGPVVTEEIATSIEPIRDFLAIVFFASIGLHVFPTFVAYELTVLVFLTLSVVVMKFLLAALVLSLILPRSSQYIKWIVSAGLAQVSEFSFVLGSRARRAGVISREVYLLILSVTTLSLLLAPVLWRAAITRCVPRPERRSSL

SEQ ID NO: 68679 - protein, 73 aa, Homo sapiens
LFFCLFCSLGLGEDLEVWAPSSPLETAMVSSNHHHLTTLHGGCPLRAASAAALSSPLYLSAPEPQSSFRPRDR

SEQ ID NO: 68680 - protein, 46 aa, Homo sapiens
IPPDTKAALLLLLTFLAKQHTDSFQAALGSLPVDKAQELQAVLGLS

SEQ ID NO: 68681 - protein, 32 aa, Homo sapiens
RPEPPLLCCLLLFLRAPVSARPPTLLRNLTRN

SEQ ID NO: 68682 - protein, 533 aa, Homo sapiens
LRRRGSPGMGVHVGAALGALWFCLTGALEVQVPEDPVVALVGTDATLCCSFSPEPGFSLAQLNLIWQLTDTKQLVHSFAEGQDQGSAYANRTALFPDLLAQGNASLRLQRVRVADEGSFTCFVSIRDFGSAAVSLQVAAPYSKPSMTLEPNKDLRPGDTVTITCSSYQGYPEAEVFWQDGQGVPLTGNVTTSQMANEQGLFDVHSILRVVLGANGTYSCLVRNPVLQQDAHSSVTITPQRSPTGAVEVQVPEDPVVALVGTDATLRCSFSPEPGFSLAQLNLIWQLTDTKQLVHSFTEGRDQGSAYANRTALFPDLLAQGNASLRLQRVRVADEGSFTCFVSIRDFGSAAVSLQVAAPYSKPSMTLEPNKDLRPGDTVTITCSSYRGYPEAEVFWQDGQGVPLTGNVTTSQMANEQGLFDVHSVLRVVLGANGTYSCLVRNPVLQQDAHGSVTITGQPMTFPPEALWVTVGLSVCLIALLVALAFVCWRKIKQSCEEENAGAEDQDGEGEGSKTALQPLKHSDSKEDDGQEIA

SEQ ID NO: 68683 - protein, 89 aa, Homo sapiens
VLLAALAAVGAAYCVRRGRAMAAAAQDKGQVGPGAGPLELEGVKVPLEPGPKATEGGGEALPSGSECEVPLMGFPGPGLQSPLHAKPYI

SEQ ID NO: 68684 - protein, 456 aa, Homo sapiens
LALCLLLPLLLLGGWKRWRRGRAARHVVAVVLGDVGRSPRMQYHALSLAMHGFSVTLLGFCNSKPHDELLQNNRIQIVGLTELQSLAVGPRVFQYGVKVVLQAMYLLWKLMWREPGAYIFLQNPPGLPSIAVCWFVGCLCGSKLVIDWHNYGYSIMGLVHGPNHPLVLLAKWYEKFFGRLSHLNLCVTNAMREDLADNWHIRAVTVYDKPASFFKETPLDLQHRLFMKLGSMHSPFRARSEPEDPVTERSAFTERDAGSGLVTRLRERPALLVSSTSWTEDEDFSILLAALEKFEQLTLDGHNLPSLVCVITGKGPLREYYSRLIHQKHFQHIQVCTPWLEAEDYPLLLGSADLGVCLHTSSSGLDLPMKVVDMFGCCLPVCAVNFKCLHELVKHEENGLVFEDSEELAAQLQMLFSNFPDPAGKLNQFRKNLRESQQLRWDESWVQTVLPLVMDT

SEQ ID NO: 68685 - protein, 683 aa, Homo sapiens
LFLLSLLFLVQGAHGRGHREDFRFCSQRNQTHRSSLHYKPTPDLRISIENSEEALTVHAPFPAAHPASRSFPDPRGLYHFCLYWNRHAGRLHLLYGKRDFLLSDKASSLLCFQHQEESLAQGPPLLATSVTSWWSPQNISLPSAASFTFSFHSPPHTAAHNASVDMCELKRDLQLLSQFLKHPQKASRRPSAAPASQQLQSLESKLTSVRFMGDMVSFEEDRINATVWKLQPTAGLQDLHIHSRQEEEQSEIMEYSVLLPRTLFQRTKGRSGEAEKRLLLVDFSSQALFQDKNSSQVLGEKVLGIVVQNTKVANLTEPVVLTFQHQLQPKNVTLQCVFWVEDPTLSSPGHWSSAGCETVRRETQTSCFCNHLTYFAVLMVSSVEVDAVHKHYLSLLSYVGCVVSALACLVTIAAYLCSRVPLPCRRKPRDYTIKVHMNLLLAVFLLDTSFLLSEPVALTGSEAGCRASAIFLHFSLLTCLSWMGLEGYNLYRLVVEVFGTYVPGYLLKLSAMGWGFPIFLVTLVALVDVDNYGPIILAVHRTPEGVIYPSMCWIRDSLVSYITNLGLFSLVFLFNMAMLATMVVQILRLRPHTQKWSHVLTLLGLSLVLGLPWALIFFSFASGTFQLVVLYLFSIITSFQGFLIFIWYWSMRLQARGGPSPLKSNSDSARLPISSGSTSSSRI

SEQ ID NO: 68686 - protein, 59 aa, Homo sapiens
MTSDNYYYTHSIWHILLAGSAALLLPPPDQPAEPWACSQKFPCHYQICKNDREELYAVT

SEQ ID NO: 68687 - protein, 72 aa, Homo sapiens
LMWLFGCPLLLDDVARESWLLPGSNDLLLEVGPRLNFSTPTSTNIVSVCRATGLGPVDRVETTRRYRLSVWL

SEQ ID NO: 68688 - protein, 35 aa, Homo sapiens
LARLRHWVYLLCFSAVFRRELSEYTEGLTSEPLTA

SEQ ID NO: 68689 - protein, 447 aa, Homo sapiens
VFLGFMSFVTTTFVIEAMAAANAQLHWKRMENLKEEEDDDSSTASDSDVLIRDNYERAEKRPILSVQRRGSPNPFEITDRVEMGQMASMFFNKVGVNLFYFCIIVYLYGDLAIYAAAVPFSLMQVTCSATGNDSCGVEADTKYNDTDRCWGPLRRVDAYRIYLAIFTLLLGPFTFFDVQKTKYLQILTSLMRWIAFAVMIVLALIRIGHGQGEGHPPLADFSGVRNLFGVCVYSFMCQHSLPSLITPVSSKRHLTRLVFLDYVLILAFYGLLSFTAIFCFRGDSLMDMYTLNFARCDVVGLAAVRFFLGLFPVFTISTNFPIIAVTLRNNWKTLFHREGGTYPWVVDRVVFPTITLVPPVLVAFCTHDLESLVGITGAYAGTGIQYVIPAFLVYHCRRDTQLAFGCGVSNKHRSPFRHTFWVGFVLLWAFSCFIFVTANIILSETKL

SEQ ID NO: 68690 - protein, 45 aa, Homo sapiens
VVAVAAAVVVVAAAAAKGAERKERGGTGPGQRVLWAPGFAPRPRL

SEQ ID NO: 68691 - protein, 36 aa, Homo sapiens
VAFWCLRLLWPLLSLWRQMMLEIDFGFSWSWNLCNV

SEQ ID NO: 68692 - protein, 324 aa, Homo sapiens
LCRACLALAAALAALLLLPLPLPRAPAPARTPAPAPRAPPSRPAAPSLRPDDVFIAVKTTRKNHGPRLRLLLRTWISRARQQTFIFTDGDDPELELQGGDRVINTNCSAVRTRQALCCKMSVEYDKFIESGRKWFCHVDDDNYVNARSLLHLLSSFSPSQDVYLGRPSLDHPIEATERVQGGRTVTTVKFWFATGGAGFCLSRGLALKMSPWASLGSFMSTAEQVRLPDDCTVGYIVEGLLGARLLHSPLFHSHLENLQRLPPDTLLQQVTLSHGGPENPHNVVNVAGGFSLHQDPTRFKSIHCLLYPDTDWCPRQKQGAPTSR

SEQ ID NO: 68693 - protein, 77 aa, Homo sapiens
LVMSDVGFLIISILALLGVFGRLTLQPALHCAVCIRKPAHSAGVSSINKHQPQAPLSFDGNPLEFNFQIQILGTVGS

SEQ ID NO: 68694 - protein, 43 aa, Homo sapiens
MALGALLPFSIIMWTTGATAQSKTLQDVSPQASETEIPQRPQL

SEQ ID NO: 68695 - protein, 190 aa, Homo sapiens
LLIHFVFFASIFDIYFTSPLVHGMTPQFTPLPPPARRLVLFVADGLRADALYELDENGNSRAPFIRNIIMHEGSWGISHTRVPTESRPGHVALIAGFYEDVSAVAKGWKENPVEFDSLFNESKYTWSWGSPDILPMFAKGASGDHVYTYSYDAKREDFGAQDATKLDTWVFDNVKVCAIEWLIYKKHIFT

SEQ ID NO: 68696 - protein, 3071 aa, Homo sapiens
VLLVLLLCVAAQCRQRGLFPAILNLASNAHISTNATCGEKGPEMFCKLVEHVPGRPVRNPQCRICDGNSANPRERHPISHAIDGTNNWWQSPSIQNGREYHWVTITLDLRQVFQVAYVIIKAANAPRPGNWILERSLDGTTFSPWQYYAVSDSECLSRYNITPRRGPPTYRADDEVICTSYYSRLVPLEHGEIHTSLINGRPSADDLSPKLLEFTSARYIRLRLQRIRTLNADLMTLSHREPKELDPIVTRRYYYSIKDISVGGMCICYGHASSCPWDETTKKLQCQCEHNTCGESCNRCCPGYHQQPWRPGTVSSGNTCEACNCHNKAKDCYYDESVAKQKKSLNTAGQFRGGGVCINCLQNTMGINCETCIDGYYRPHKVSPYEDEPCRPCNCDPVGSLSSVCIKDDLHSDLHNGKQPGQCPCKEGYTGEKCDRCQLGYKDYPTCVSCGCNPVGSASDEPCTGPCVCKENVEGKACDRCKPGFYNLKEKNPRGCSECFCFGVSDVCSSLSWPVGQVNSMSGWLVTDLISPRKIPSQQDALGGRHQVSINNTAVMQRLAPKYYWAAPEAYLGNKLTAFGGFLKYTVSYDIPVETVDSNLMSHADVIIKGNGLTLSTQAEGLSLQPYEEYLNVVRLVPENFQDFHSKRQIDRDQLMTVLANVTHLLIRANYNSAKMALYRLESVSLDIASSNAIDLVVAADVEHCECPQGYTGTSCESCLSGYYRVDGILFGGICQPCECHGHAAECNVHGVCIACAHNTTGVHCEQCLPGFYGEPSRGTPGDCQPCACPLTIASNNFSPTCHLNDGDEVVCDWCAPGYSGAWCERCADGYYGNPTVPGESCVPCDCSGNVDPSEAGHCDSVTGECLKCLGNTDGAHCERCADGFYGDAVTAKNCRACECHVKGSHSAVCHLETGLCDCKPNVTGQQCDQCLHGYYGLDSGHGCRPCNCSVAGSVSDGCTDEGQCHCVPGVAGKRCDRCAHGFYAYQDGSCTPCDCPHTQNTCDPETGECVCPPHTQGVKCEECEDGHWGYDAEVGCQACNCSLVGSTHHRCDVVTGHCQCKSKFGGRACDQCSLGYRDFPDCVPCDCDLRGTSGDACNLEQGLCGCVEETGACPCKENVFGPQCNECREGTFALRADNPLGCSPCFCSGLSHLCSELEDYVRTPVTLGSDQPLLRVVSQSNLRGTTEGVYYQAPDFLLDAATVRQHIRAEPFYWRLPQQFQGDQLMAYGGKLKYSVAFYSLDGVGTSNFEPQVLIKGGRIRKQVIYMDAPAPENGVRQEQEVAMRENFWKYFNSVSEKPVTREDFMSVLSDIEYILIKASYGQGLQQSRISDISMEVGRKAEKLHPEEEVASLLENCVCPPGTVGFSCQDCAPGYHRGKLPAGSDRGPRPLVAPCVPCSCNNHSDTCDPNTGKCLNCGDNTAGDHCDVCTSGYYGKVTGSASDCALCACPHSPPASFSPTCVLEGDHDFRCDACLLGYEGKHCERCSSSYYGNPQTPGGSCQKCDCNPHGSVHGDCDRTSGQCVCRLGASGLRCDECEPRHILMETDCVSCDDECVGVLLNDLDEIGDAVLSLNLTGIIPVPYGILSNLENTTKYLQESLLKENMQKDLGKIKLEGVAEETDNLQKKLTRMLASTQKVNRATERIFKESQDLAIAIERLQMSITEIMEKTTLNQTLDEDFLLPNSTLQNMQQNGTSLLEIMQIRDFTQLHQNATLELKAAEDLLSQIQENYQKPLEELEVLKEAASHVLSKHNNELKAAEALVREAEAKMQESNHLLLMVNANLREFSDKKLHVQEEQNLTSELIVQGRGLIDAAAAQTDAVQDALEHLEDHQDKLLLWSAKIRHHIDDLVMHMSQRNAVDLVYRAEDHAAEFQRLADVLYSGLENIRNVSLNATSAAYVHYNIQSLIEESEELARDAHRTVTETSLLSESLVSNGKAAVQRSSRFLKEGNNLSRKLPGIALELSELRNKTNRFQENAVEITRQTNESLLILRAIPKGIRDKGAKTKELATSASQSAVSTLRDVAGLSQELLNTSASLSRVNTTLRETHQLLQDSTMATLLAGRKVKDVEIQANLLFDRLKPLKMLEENLSRNLSEIKLLISQARKQAASIKVAVSADRDCIRAYQPQISSTNYNTLTLNVKTQEPDNLLFYLGSSTASDFLAVEMRRGRVAFLWDLGSGSTRLEFPDFPIDDNRWHSIHVARFGNIGSLSVKEMSSNQKSPTKTSKSPGTANVLDVNNSTLMFVGGLGGQIKKSPAVKVTHFKGCLGEAFLNGKSIGLWNYIEREGKCRGCFGSSQNEDPSFHFDGSGYSVVEKSLPATVTQIIMLFNTFSPNGLLLYLGSYGTKDFLSIELFRGRVKVMTDLGSGPITLLTDRRYNNGTWYKIAFQRNRKQGVLAVIDAYNTSNKETKQGETPGASSDLNRLDKDPIYVGGLPRSRVVRRGVTTKSFVGCIKNLEISRSTFDLLRNSYGVRKGCLLEPIRSVSFLKGGYIELPPKSLSPESEWLVTFATTNSSGIILAALGGDVEKRGDREEAHVPFFSVMLIGGNIEVHVNPGDGTGLRKALLHAPTGTCSDGQAHSISLVRNRRIITVQLDENNPVEMKLGTLVESRTINVSNLYVGGIPEGEGTSLLTMRRSFHGCIKNLIFNLELLDFNSAVGHEQVDLDTCWLSERPKLAPDAEDSKLLPEPRAFPEQCVVDAALEYVPGAHQFGLTQNSHFILPFNQSAVRKKLSVELSIRTFASSGLIYYMAHQNQADYAVLQLHGGRLHFMFDLGKGRTKVSHPALLSDGKWHTVKTDYVKRKGFITVDGRESPMVTVVGDGTMLDVEGLFYLGGLPSQYQARKIGNITHSIPACIGDVTVNSKQLDKDSPVSAFTVNRCYAVAQEGTYFDGSGYAALVKEGYKVQSDVNITLEFRTSSQNGVLLGISTAKVDAIGLELVDGKVLFHVNNGAGRITAAYEPKTATVLCDGKWHTLQANKSKHRITLIVDGNAVGAESPHTQSTSVDTNNPIYVGGYPAGVKQKCLRSQTSFRGCLRKLALIKSPQVQSFDFSRAFELHGVFLHSCPGTES

SEQ ID NO: 68697 - protein, 626 aa, Homo sapiens
TRGAMAAAPRAGRRRGQPLLALLLLLLAPLPPGAPPGADAYFPEERWSPESPLQAPRVLIALLARNAAHALPTTLGALERLRHPRERTALWVATDHNMDNTSTVLREWLVAVKSLYHSVEWRPAEEPRSYPDEEGPKHWSDSRYEHVMKLRQAALKSARDMWADYILFVDADNLILNPDTLSLLIAENKTVVAPMLDSRAAYSNFWCGMTSQGYYKRTPAYIPIRKRDRRGCFAVPMVHSTFLIDLRKAASRNLAFYPPHPDYTWSFDDIIVFAFSCKQAEVQMYVCNKEEYGFLPVPLRAHSTLQDEAESFMHVQLEVMVKHPPAEPSRFISAPTKTPDKMGFDEVFMINLRRRQDRRERMLRALQAQEIECRLVEAVDGKAMNTSQVEALGIQMLPGYRDPYHGRPLTKGELGCFLSHYNIWKEVVDRGLQKSLVFEDDLRFEIFFKRRLMNLMRDVEREGLDWDLIYVGRKRMQVEHPEKAVPRVRNLVEADYSYWTLAYVISLQGARKLLAAEPLSKMLPVDEFLPVMFDKHPVSEYKAHFSLRNLHAFSVEPLLIYPTHYTGDDGYVSDTETSVVWNNEHVKTDWDRAKSQKMREQQALSREAKNSDVLQSPLDSAARDEL

SEQ ID NO: 68698 - protein, 55 aa, Homo sapiens
VLLTLGVVTIVLALMYVFREHQRSGSYHVREESTYLPLTSMQPTEAMGEEPSRAE

SEQ ID NO: 68699 - protein, 1109 aa, Homo sapiens
IPEAALLVLATICLAHALTVLSGHWSVHAHCALTCTPEYDPSKATFVKVVPTPNNGSTELVALHRNEGEDGLEVLSFEFQKIKYSYDALEKKQFLPVAFPVGNAFSYYQSNRGFQEDSEIRAAEKKFGSNKAEMVVPDFSELFKERATAPFFVFQVFCVGLWCLDEYWYYSVFTLSMLVAFEASLVQQQMRNMSEIRKMGNKPHMIQVYRSRKWRPIASDEIVPGDIVSIGRSPQENLVPCDVLLLRGRCIVDEAMLTGESVPQMKEPIEDLSPDRVLDLQADSRLHVIFGGTKVVQHIPPQKATTGLKPVDSGCVAYVLRTGFNTSQGKLLRTILFGVKRVTANNLETFIFILFLLVFAIAAAAYVWIEGTKDPSRNRYKLFLECTLILTSVVPPELPIELSLAVNTSLIALAKLYMYCTEPFRIPFAGKVEVCCFDKTGTLTSDSLVVRGVAGLRDGKEVTPVSSIPVETHRALASCHSLMQLDDGTLVGDPLEKAMLTAVDWTLTKDEKVFPRSIKTQGLKIHQRFHFASALKRMSVLASYEKLGSTDLCYIAAVKGAPETLHSMFSQCPPDYHHIHTEISREGARVLALGYKELGHLTHQQAREVKREALECSLKFVGFIVVSCPLKADSKAVIREIQNASHRVVMITGDNPLTACHVAQELHFIEKAHTLILQPPSEKGRQCEWRSIDGSIVLPLARGSPKALALEYALCLTGDGLAHLQATDPQQLLRLIPHVQVFARVAPKQKEFVITSLKELGYVTLMCGDGTNDVGALKHADVGVALLANAPERVVERRRRPRDSPTLSNSGIRATSRTAKQRSGLPPSEEQPTSQRDRLSQVLRDLEDESTPIVKLGDASIAAPFTSKLSSIQCICHVIKQGRCTLVTTLQMFKILALNALILAYSQSVLYLEGVKFSDFQATLQGLLLAGCFLFISRSKPLKTLSRERPLPNIFNLYTILTVMLQFFVHFLSLVYLYREAQARSPEKQEQFVDLYKEFEPSLVNSTVYIMAMAMQMATFAINYKGPPFMESLPENKPLVWSLAVSLLAIIGLLLGSSPDFNSQFGLVDIPVEFKLVIAQVLLLDFCLALLADRVLQFFLGTPKLKVPS

SEQ ID NO: 68700 - protein, 40 aa, Homo sapiens
MSHRTWPILKFLIPLTLCKMCENPPAVHQPQTKSTFSMPL

SEQ ID NO: 68701 - protein, 48 aa, Homo sapiens
LLTLMNLYWFLYIVAFAAKVLTGQVHELKDLREYDTAEAQSLKPSKAE

SEQ ID NO: 68702 - protein, 16 aa, Homo sapiens
VGLVLYLISFDYEIKR

SEQ ID NO: 68703 - protein, 334 aa, Homo sapiens
KPRNPQRPSMAWSLGSWLGGCLLVSALGMVPPPENVRMNSVNFKNILQWESPAFAKGNLTFTAQYLSYRIFQDKCMNTTLTECDFSSLSKYGDHTLRVRAEFADEHSDWVNITFCPVDDTIIGPPGMQVEVLADSLHMRFLAPKIENEYETWTMKNVYNSWTYNVQYWKNGTDEKFQITPQYDFEVLRNLEPWTTYCVQVRGFLPDRNKAGEWSEPVCEQTTHDETVPSWMVAVILMASVFMVCLALLGCFALLWCVYKKTKYAFSPRNSLPQHLKEFLGHPHHNTLLFFSFPLSDENDVFDKLSVIAEDSESGKQNPGDSCSLGTPPGQGPQS

SEQ ID NO: 68704 - protein, 35 aa, Homo sapiens
IPFNLLTLLLFEGTYIRAYFAKKEDGCFRSGHRKS

SEQ ID NO: 68705 - protein, 17 aa, Homo sapiens
KPRRRKRRLVGTMGIML

SEQ ID NO: 68706 - protein, 404 aa, Homo sapiens
ISLAFLTFSVVLALFLKRPKRSLFFNRDDRGRCETSASELERMNPGPGGKLGHALRVACGDSVLARMLRELGDSLRRPQLRLWSLWWVFNSAGYYLVVYYVHILWNEVDPTTNSARVYNGAADAASTLLGAITSFAAGFVKIRWARWSKLLIAGVTATQAGLVFLLAHTRHPSSIWLCYAAFVLFRGSYQFLVPIATFQIASSLSKELCALVFGVNTFFATIVKTIITFIVSDVRGLGLPVRKQFQLYSVYFLILSIIYFLGAMLDGLRHCQRGHHPRQPPAQGLRSAAEEKAAQALSVQDKGLGGLQPAQSPPLSPEDSLGAVGPASLEQRQSDPYLAQAPAPQAAEFLSPVTTPSPCTLCSAQASGPEAADETCPQLAVHPPGVSKLGLQCLPSDGVQNVNQ

SEQ ID NO: 68707 - protein, 59 aa, Homo sapiens
RNSWPLLPWLLLPATSSLNMSEIRKQPNLSCNRDGHARKQTARACSLVGAELSSRVVAN

SEQ ID NO: 68708 - protein, 549 aa, Homo sapiens
VPKADSGAFLLLFLLVLTVTEPLRPELRCNPGQFACRSGTIQCIPLPWQCDGWATCEDESDEANCPEVTGEVRPHHGKEAVDPRQGRARGGDPSHFHAVNVAQPVRFSSFLGKCPTGWHHYEGTASCYRVYLSGENYWDAAQTCQRLNGSLATFSTDQELRFVLAQEWDQPERSFGWKDQRKLWVGYQYVITGRNRSLEGRWEVAFKGSSEVFLPPDPIFASAMSENDNVFCAQLQCFHFPTLRHHDLHSWHAESCYEKSSFLCKRSQTCVDIKDNVVDEGFYFTPKGDDPCLSCTCHGGEPEMCVAALCERPQGCQQYRKDPKECCKFMCLDPDGNSLFDSMASGMRLVVSCISSFLILSLLLFMVHRLRQRRRERIESLIGANLHHFNLGRRIPGFDYGPDGFGTGLTPLHLSDDGEGGTFHFHDPPPPYTAYKYPDIGQPDDPPPPYEASIHPDSVFYDPADDDAFEPVEVSLPAPGDGGSEGALLRRLEQPLPTAGASLADLEDSADSSSALLVPPDPAQSGSTPAAEALPGGGRHSRSSLNTVV

SEQ ID NO: 68709 - protein, 74 aa, Homo sapiens
LMLLMSTLWLVGAGPGLVLAPELLLDPWQGEGQPRGPWRKQETCCRAWAHLAGAAQGLQGSNRDGAQCPGKAWP

SEQ ID NO: 68710 - protein, 19 aa, Homo sapiens
LDFEVWVLFWLCLPGCPVP

SEQ ID NO: 68711 - protein, 95 aa, Homo sapiens
LLIIIFLTVLLLKLRKRHRKHTQQRAAALSLSTLASPKGGSGTAGTEPSDIIIPLRTTENNYCPHYEKVSGDYGHPVYIVQEMPPQSPANIYYKV

SEQ ID NO: 68712 - protein, 444 aa, Homo sapiens
VAAGVVIGAGACYCVYRLAWGRDENEKIWDEDEESTDTSEIGVETVKGAKTNAGAGSGAKLQGDSEVKPEVSLGLEDCPGVKEKAHSGSHSGGGLEAKAKALFNTLKEQASAKAGKGARVGTISGNRTLAPSLPCPGGRGGGCHPTRSGSRAGGRASGKSKGKARSKSTRAPATTWPVRRGKFNFPYKIDDILSAPDLQKVLNILERTNDPFIQEVALVTLGNNAAYSFNQNAIRELGGVPIIAKLIKTKDPIIREKTYNALNNLSVNAENQGKIKTYISQVCDDTMVCRLDSAVQMAGLRLLTNMTVTNHYQHLLSYSFPDFFALLFLGNHFTKIQIMKLIINFTENPAMTRELVSCKVPSELISLFNKEWDREILLNILTLFENINDNIKNEGLASSRKEFSRSSLFFLFKESGVCVKKIKALANHNDLVVKVKVLKVLTKL

SEQ ID NO: 68713 - protein, 58 aa, Homo sapiens
IAVAVLYLALQVYGVEVPAEVEAEKPWWQVFNDDLTKPIIDNIVSDLIQIYTMDTEIP

SEQ ID NO: 68714 - protein, 1726 aa, Homo sapiens
MKILQVLRTLLLTPVGAHLTNESVCEIMQSCFRICFEMRLSELLRKSAEHTLVDMVQLLFTRLPQFKEEPKNYVGTNMKKLKMRAGGMSDSSKWKKQKRSPRPPRHMTKVTPGSELPTPNGTTLSSNLTGGMPFIDVPTPISSASSEAASAVVSPSTDSGLEFSSQTTSKEDLTDLEQPGSPGYSTATEPGSSELGVPEQPDLQEGTHVEKSQSASVESIPEVLEECTSPADHSDSASVHDMDYVNPRGVRFTQSSQKEGTALVPYGLPCIRELFRFLISLTNPHDRHNSEVMIHMGLHLLTVALESAPVAQCQTLLGLIKDEMCRHLFQLLSIERLNLYAASLRVCFLLFESMREHLKFQMEMYIKKLMEIITVENPKMPYEMKEMALEAIVQLWRIPSFVTELYINYDCDYYCSNLFEELTKLLSKNAFPVSGQLYTTHLLSLDALLTVIDSTEAHCQAKVLNSLTQQEKKETARPSCEIVDGTREASNTERTASDGKAVGMASDIPGLHLPGGGRLPPEHGKSGCSDLEEAVDSGADKKFARKPPRFSCLLPDPRELIEIKNKKKLLITGTEQFNQKPKKGIQFLQEKGLLTIPMDNTEVAQWLRENPRLDKKMIGEFVSDRKNIDLLESFVSTFSFQGLRLDEALRLYLEAFRLPGEAPVIQRLLEAFTERWMNCNGSPFANSDACFSLAYAVIMLNTDQHNHNVRKQNAPMTLEEFRKNLKGVNGGKDFEQDILEDMYHAIKNEEIVMPEEQTGLVRENYVWNVLLHRGATPEGIFLRVPTASYDLDLFTMTWGPTIAALSYVFDKSLEETIIQKAISGFRKCAMISAHYGLSDVFDNLIISLCKFTALSSESIENLPSVFGSNPKAHIAAKTVFHLAHRHGDILREGWKNIMEAMLQLFRAQLLPKAMIEVEDFVDPNGKISLQREETPSNRGESTVLSFVSWLTLSGPEQSSVRGPSTENQEAKRVALECIKQCDPEKMITESKFLQLESLQELMKALVSVTPDEETYDEEDAAFCLEMLLRIVLENRDRVGCVWQTVRDHLYHLCVQAQDFCFLVERAVVGLLRLAIRLLRREEISAQVLLSLRILLLMKPSVLSRVSHQVAYGLHELLKTNAANIHSGDDWATLFTLLECIGSGVKPPAALQATARADAPDAGAQSDSELPSYHQNDVSLDRGYTSDSEVYTDHGRPGKIHRSATDADVVNSGWLVVGKDDVDNSKPGPSRPGPSPLINQYSLTVGLDLGPHDTKSLLKCVESLSFIVRDAAHITPDNFELCVKTLRIFVEASLNGGCKSQEKRGKSHKYDSKGNRFKKKSKEGSMLRRPRTSSQHASRGGQSDDDEDEGVPASYHTVSLQVSQDLLDLMHTLHTRAASIYSSWAEEQRHLETGGQKIEADSRTLWAHCWCPLLQGIACLCCDARRQVRMQALTYLQRALLVHDLQKLDALEWESCFNKVLFPLLTKLLENISPADVGGMEETRMRASTLLSKVFLQHLSPLLSLSTFAALWLTILDFMDKYMHAGSSDLLSEAIPESLKNMLLVMDTAEIFHSADARGGGPSALWEITWERIDCFLPHLRDELFKQTVIQDPMPMEPQGQKPLASAHLTSAAGDTRTPGHPPPPEIPSELGACDFEKPESPRAASSSSPGSPVASSPSRLSPTPDGPPPLAQPPLILQPLASPLQVGVPPMTLPIILNPALIEATSPVPLLATPRPTDPIPTSEVN

SEQ ID NO: 68715 - protein, 396 aa, Homo sapiens [sequence omitted]

SEQ ID NO: 68716 - protein, 374 aa, Homo sapiens
MNRAVQLLILAYVIGCYHPHLAEVEMESPRRWVFVWEKGYQETDSVVSSVTTKVKGVAVTNTSKLGFRIWDVADYVIPAQEENSLFVMTNVILTMNQTQGLCPEIPDATTVCKSDASCTAGSAGTHSNGVSTGRCVAFNGSVKTCEVAAWCPVEDDTHVPQPAFLKAAENFTLLVKNNIWYPKFNFSKRNILPNITTTYLKSCIYDAKTDPFCPIFRLGKIVENAGHSFQDMAVEGGIMGIQVNWDCNLDRAASLCLPRYSFRRLDTRDVEHNVSPGYNFRFAKYYRDLAGNEQRTLIKAYGIRFDIIVFGKAGKFDIIPTMINIGSGLALLGMATVLCDIIVLYCMKKRLYYREKKYKYVEDYEQGLASELDQ

SEQ ID NO: 68717 - protein, 244 aa, Homo sapiens
MFPLLLLLLPFLLYMAAPQIRKMLSSGVCTSTVQLPGKVVVVTGANTGIGKETAKELAQRGARVYLACRDVEKGELVAKEIQTTTGNQQVLVRKLDLSDTKSIRAFAKGFLAEEKHLHVLINNAGVMMCPYSKTADGFEMHIGVNHLGSGVTTYSVHPGTVQSELVRHSSFMRWMWWLFSFFIKTPQQGAQTSLHCALTEGLEILSGNHFSDCHVAWVSAQARNETIARRLWDVSCDLLGLPID

SEQ ID NO: 68718 - protein, 227 aa, Homo sapiens
MFPLLLLLLPFLLYMAAPQIRKMLSSGVCTSTVQLPGKVVVVTGANTGIGKETAKELAQRGARVYLACRDVEKGELVAKEIQTTTGNQQVLVRKLDLSDTKSIRAFAKGFLAEEKHLHVLINNAGVMMCPYSKTADGFEMHIGVNHLGSGVTTYSVHPGTVQSELVRHSSFMRWMWWLFSFFIKTPQQGAQTSLHCALTEGLEILSGNHFRYECYLFLQMRFIAQRR

SEQ ID NO: 68719 - protein, 477 aa, Homo sapiens
MATNYKLEFTALVVFSSLWELMVPFTRDYNTLQEALSNMDDYDKTCLESALVGVCNIVQQEWGGAIPCQVVLVTDGCLGIGRGSLRHSLATQNQRSESNRFPLPFPFPSKLYIMCMANLEELQSTDSLECLERLIDLNNGEGQIFTIDGPLCLKNVQSMFGKLIDLAYTPFHAVLKCGHLTADVQVFPRPEPFVVDEEIDPIPKVINTDLEIVGFIDIADISSPPVLSRHLVLPIALNKEGDEVGTGITDDNEDENSANQIAGKIPNFCVLLHGSLKVEGMVAIVQLGPEWHGMLYSQADSKKKSNLMMSLFEPGPEPLPWLGKMAQLGPISDAKENPYGEDDNKSPFPLQPKNKRSYAQNVTVWIKPSGLQTDVQKILRNARKLPEKTQTFYKELNRLRKAALAFGFLDLLKGVADMLERECTLLPETAHPDAAFQLTHAAQQLKLASTGTSEYAAYDQNITPLHTDFSGSSTERI

SEQ ID NO: 68720 - protein, 296 aa, Homo sapiens
MPLALLVLLLLGPGGWCLAEPPRDSLREELVITPLPSGDVAATFQFRTRWDSELQREGVSHYRLFPKALGQLISKYSLRELHLSFTQGFWRTRYWGPPFLQAPSGAELWVWFQDTVTDVDKSWKELSNVLSGIFCASLNFIDSTNTVTPTASFKPLGLANDTDHYFLRYAVLPREVVCTENLTPWKKLLPCSSKAGLSVLLKADRLFHTSYHSQAVHIRPVCRNARCTSISWELRQTLSVVFDAFITGQGKKDWSLFRMFSRTLTEPCPLASESRVYVDITTYNQPCLCVPRTTRH

SEQ ID NO: 68721 - protein, 37 aa, Homo sapiens
MLSFFICLLIFVHLLLLSFLISDWPPPTGSAEHKYSG

SEQ ID NO: 68722 - protein, 140 aa, Homo sapiens
MVLTSALLLCSVAGQGCPTLAGILDINFLINKMQEDPASKCHCSANVTSCLCLGIPSDNCTRPCFSERLSQMTNTTMQTRYPLIFSRVKKSVEVLKNNKCPYFSCEQPCNQTTAGNALTFLKSLLEIFQKEKMRGMRGKI

SEQ ID NO: 68723 - protein, 62 aa, Homo sapiens
LNLISLLALRVLAEQNIIPSATNVTCYYQPAPYVSDGNFSNYYVAHPPVTYSQPYPTWLPCN

SEQ ID NO: 68724 - protein, 170 aa, Homo sapiens
TRPRLGATCLLGFSFLLLVISSDGHNGLGKGFGDHIHWRTLEDGKKEAAASGLPLMVIIHKSWCGACKALKPKFAESTEISELSHNFVMVNLEDEEEPKDEDFSPDGGYIPRILFLDPSGKVHPEIINENGNPSYKYFYVSAEQVVQGMKEAQERLTGDAFRKKHLEDEL

SEQ ID NO: 68725 - protein, 73 aa, Homo sapiens
LGLTNNQLFFLGFAQVWCSVRTPESSHEGLITDPHSPSRFRVIGSLSNSKEFSEHFRCPPGSPMNPPHKCEVW

SEQ ID NO: 68726 - protein, 19 aa, Homo sapiens
VSSILSILTLIYPWLRLKP

SEQ ID NO: 68727 - protein, 80 aa, Homo sapiens
ILGSTWVALTTGALGLELPLSCQEVLWPLPAYLLVSAGCYALGTVGYRVATFHDCEDAARELQSQIQEARADLARRGLRF

SEQ ID NO: 68728 - protein, 22 aa, Homo sapiens
LSLWTPVFWVLVLAFQTETPLL

SEQ ID NO: 68729 - protein, 21 aa, Homo sapiens
MGCRPFHGWTSLVLLAMAEDY

SEQ ID NO: 68730 - protein, 25 aa, Homo sapiens
LLTLGYVLYASAMTLLTERGKLHQP

SEQ ID NO: 68731 - protein, 177 aa, Homo sapiens
LLAVAYVSSVALAVASVAVIHQSLGLSCIPTPGPPDLGLTSRCLLEPCIPSVPQCLPSLANVSSCLEGSMGLRSLWGSLLASLTPPPLPPPDPPAPPTLLHNCHLCQKLQRDSPTCHACLHPNRTVPTALSSPWYHTYGLAPPWPWSPVLLSLPQPQQCSLFSVMELARLKSFVFPG

SEQ ID NO: 68732 - protein, 169 aa, Homo sapiens
LGLALVISLIFNISHYVEKQRQDKMYSYSSDHTRVDEYYIEDTPIYGNLDDMISEPMDENCYEQMKARPEKSVNKMQEATPSAQATNETQMCYASLDHSVKGKRRKPRKQNTHFSDKDGDEQLHAIDASVSKTTLVDSFSPESQAVEENIHDDPIRLFGLIRAKREPIN

SEQ ID NO: 68733 - protein, 12 aa, Homo sapiens
ITMYFMWRTLFF

SEQ ID NO: 68734 - protein, 34 aa, Homo sapiens
ICVFIGFGWWFFLGPKFKKLQDEGSSSWKCKRNN

SEQ ID NO: 68735 - protein, 37 aa, Homo sapiens
LGDLLGTGLLALCFFTDWLLKSKAELGGISELASGPP

SEQ ID NO: 68736 - protein, 105 aa, Homo sapiens
LELPELRFGTFIGAHLLWTVSMSEFWLCFNCCIAEQPQPKRRRRIDRSMIGEPTNFVHTAHVGSGDLFSGMNSVSSIQNQMQSKGGYGGGMPANVQMQLVDTKAG

SEQ ID NO: 68737 - protein, 248 aa, Homo sapiens
LLGTVVALKVVLYLLRVCLAMAWKSGGASHSELIHNLRKNGIIKTDKVFEVMLATDRSHYAKCNPYMDSPQSIGFQATISAPHMHAYALELLFDQLHEGAKALDVGSGSGILTACFARMVGCTGKVIGIDHIKELVDDSVNNVRKDDPTLLSSGRVQLVVGDGRMGYAEEAPYDAIHVGAAAPVVPQALIDQLKPGGRLILPVGPAGGNQMLEQYDKLQDGSIKMKPLMGVIYVPLTDKEKQWSRDEL

SEQ ID NO: 68738 - protein, 372 aa, Homo sapiens
RMAVMAPRTLLLLLSGALALTQTWAGSHSMRYFFTSVSRPGRGEPRFIAVGYVDDTQFVRFDSDAASQRMEPRAPWIEQEGPEYWDQETRNVKAQSQTDRVDLGTLRGYYNQSEAGSHTIQIMYGCDVGSDGRFLRGYRQDAYDGKDYIALNEDLRSWTAADMAAQITKRKWEAAHEAEQLRAYLDGTCVEWLRRYLENGKETLQRTDPPKTHMTHHPISDHEATLRCWALGFYPAEITLTWQRDGEDQTQDTELVETRPAGDGTFQKWAAVVVPSGEEQRYTCHVQHEGLPKPLTLRWELSSQPTIPIVGIIAGLVLLGAVITGAVVAAVMWRRKSSGGEGVKDRKGGSYTQAASSDSAQGSDVSLTACKV

SEQ ID NO: 68739 - protein, 52 aa, Homo sapiens
VLGVVLTLLVLMLIMVYGFWKKRHMASYSMCSDPSTRDPPGRPEPYVEVYLI

SEQ ID NO: 68740 - protein, 18 aa, Homo sapiens
LLLLLLLLVAPLQMYCCP

SEQ ID NO: 68741 - protein, 89 aa, Homo sapiens
KTGSSPEDCCVHCILACLFCEFLTLCNIVLGQASCGICTSEACCCCCGDEMGDDCNCPCDMDCGIMDACCESSDCLEICMECCGICFPS

SEQ ID NO: 68742 - protein, 35 aa, Homo sapiens
RSWRLGLALLLGGALLFWVLLHRRWSEAVAEVGPD

SEQ ID NO: 68743 - protein, 33 aa, Homo sapiens
ILTLLLISYLHEYFSLFSVSLKIELPTPKYEIG

SEQ ID NO: 68744 - protein, 287 aa, Homo sapiens
KTSASLPRLVPRVRKMDSYLLMWGLLTFIMVPGCQAELCDDDPPEIPHATFKAMAYKEGTMLNCECKRGFRRIKSGSLYMLCTGNSSHSSWDNQCQCTSSATRNTTKQVTPQPEEQKERKTTEMQSPMQPVDQASLPGHCREPPPWENEATERIYHFVVGQMVYYQCVQGYRALHRGPAESVCKMTHGKTRWTQPQLICTGEMETSQFPGEEKPQASPEGRPESETSCLVTTTDFQIQTEMAATMETSIFTTEYQVAVAGCVFLLISVLLLSGLTWQRRQRKSRRTI

SEQ ID NO: 68745 - protein, 13 aa, Homo sapiens
IPTSLSLLLACTS

SEQ ID NO: 68746 - protein, 178 aa, Homo sapiens
KGLAVLILAIILLQGTLAQSIKGNHLVKVYDYQEDGSVLLTCDAEAKNITWFKDGKMIGFLTEDKKKWNLGSNAKDPRGMYQCKGSQNKSKPLQVYYRMCQNCIELNAATISGFLFAEIVSIFVLAVGVYFIAGQDGVRQSRASDKQTLLPNDQLYQPLKDREDDQYSHLQGNQLRRN

SEQ ID NO: 68747 - protein, 29 aa, Homo sapiens
IAPLFGIAQVVYFLGIAESLLGLLQDPQA

SEQ ID NO: 68748 - protein, 48 aa, Homo sapiens
LPYFYIIYMAILLTHRCLRDEHRCASKYGRDWERYTAAVPYRLLPGIF

SEQ ID NO: 68749 - protein, 33 aa, Homo sapiens
ILFLLIVLLLTVLFRMQAQPPGYRHVADGEDHA

SEQ ID NO: 68750 - protein, 949 aa, Homo sapiens
LVLAFLGVCLGITLAVDRSNFKTCEESSFCKRQRSIRPGLSPYRALLDSLQLGPDSLTVHLIHEVTKVLLVLELQGLQKNMTRFRIDELEPRRPRYRVPDVLVADPPIARLSVSGRDENSVELTMAEGPYKIILTARPFRLDLLEDRSLLLSVNARGLLEFEHQRAPRVSFSDKVNLTLGSIWDKIKNLFSRQGSKDPAEGDGAQPEETPRDGDKPEETQGKAEKDEPGAWEETFKTHSDSKPYGPMSVGLDFSLPGMEHVYGIPEHADNLRLKVTEGGEPYRLYNLDVFQYELYNPMALYGSVPVLLAHNPHRDLGIFWLNAAETWVDISSNTAGKTLFGKMMDYLQGSGETPQTDVRWMSETGIIDVFLLLGPSISDVFRQYASLTGTQALPPLFSLGYHQSRWNYRDEADVLEVDQGFDDHNLPCDVIWLDIEHADGKRYFTWDPSRFPQPRTMLERLASKRRKLVAIVDPHIKVDSGYRVHEELRNLGLYVKTRDGSDYEGWCWPGSAGYPDFTNPTMRAWWANMFSYDNYEGSAPNLFVWNDMNEPSVFNGPEVTMLKDAQHYGGWEHRDVHNIYGLYVHMATADGLRQRSGGMERPFVLARAFFAGSQRFGAVWTGDNTAEWDHLKISIPMCLSLGLVGLSFCGADVGGFFKNPEPELLVRWYQMGAYQPFFRAHAHLDTGRREPWLLPSQHNDIIRDALGQRYSLLPFWYTLLYQAHREGIPVMRPLWVQYPQDVTTFNIDDQYLLGDALLVHPVSDSGAHGVQVYLPGQGEVWYDIQSYQKHHGPQTLYLPVTLSSIPVFQRGGTIVPRWMRVRRSSECMKDDPITLFVALSPQGTAQGELFLDDGHTFNYQTRQEFLLRRFSFSGNTLVSSSADPEGHFETPIWIERVVIIGAGKPAAVVLQTKGSPESRLSFQHDPETSVLVLRKPGINVASDWSIHLR

SEQ ID NO: 68751 - protein, 656 aa, Homo sapiens
LSPPRWPRLLLLSLLLLGAVPGPRRSGAFYLPGLAPVNFCDEEKKSDECKAEIELFVNRLDSVESVLPYEYTAFDFCQASEGKRPSENLGQVLFGERIEPSPYKFTFNKKETCKLVCTKTYHTEKAEDKQKLEFLKKSMLLNYQHHWIVDNMPVTWCYDVEDGQRFCNPGFPIGCYITDKGHAKDACVISSDFHERDTFYIFNHVDIKIYYHVVETGSMGARLVAAKLEPKSFKHTHIDKPDCSGPPMDISNKASGEIKIAYTYSVSFEEDDKIRWASRWDYILESMPHTHIQWFSIMNSLVIVLFLSGMVAMIMLRTLHKDIARYNQMDSTEDAQEEFGWKLVHGDIFRPPRKGMLLSVFLGSGTQILIMTFVTLFFACLGFLSPANRGALMTCAVVLWVLLGTPAGYVAARFYKSFGGEKWKTNVLLTSFLCPGIVFADFFIMNLILWGEGSSAAIPFGTLVAILALWFCISVPLTFIGAYFGFKKNAIEHPVRTNQIPRQIPEQSFYTKPLPGIIMGGILPFGCIFIQLFFILNSIWSHQMYYMFGFLFLVFIILVITCSEATILLCYFHLCAEDYHWQWRSFLTSGFTAVYFLIYAVHYFFSKLQITGTASTILYFGYTMIMVLIFFLFTGTIGFFACFWFVTKIYSVVKVD

SEQ ID NO: 68752 - protein, 14 aa, Homo sapiens
VVSSLAFWLCHALL

SEQ ID NO: 68753 - protein, 406 aa, Homo sapiens
LPVCLEMATLLLLLGVLVVSPDALGSTTAVQTPTSGEPLVSTSEPLSSKMYTTSITSDPKADSTGDQTSALPPSTSINEGSPLWTSIGASTGSPLPEPTTYQEVSIKMSSVPQETPHATSHPAVPITANSLGSHTVTGGTITTNSPETSSRTSGAPVTTAASSLETSRGTSGPPLTMATVSLETSKGTSGPPVTMATDSLETSTGTTGPPVTMTTGSLEPSSGASGPQVSSVKLSTMMSPTTSTNASTVPFRNPDENSRGMLPVAVLVALLAVIVLVALLLLWRRRQKRRTGALVLSRGGKRNGVVDAWAGPAQVPEEGAVTVTVGGSGGDKGSGFPDGEGSSRRPTLTTFFGRRKSRQGSLAMEELKSGSGPSLKGEEEPLVASEDGAVDAPAPDEPEGGDGAAP

SEQ ID NO: 68754 - protein, 152 aa, Homo sapiens
VSSALMIWKGLIVLTGSESPIVVVLSGSMEPAFHRGDLLFLTNFREDPIRAGEIVVFKVEGRDIPIVHRVIKVHEKDNGDIKFLTKGDNNEVDDRGLYKEGQNWLEKKDVVGRARGFLPYVGMVTIIMNDYPKFKYALLAVMGAYVLLKRES

SEQ ID NO: 68755 - protein, 36 aa, Homo sapiens
MGLFRTIALFYLGSFDSIVRRCMMQREKSENADKTA

SEQ ID NO: 68756 - protein, 43 aa, Homo sapiens
KSFFAKYWMYIIPVVLFLMMSGAPDTGGQGGGGGGGGGGGSGR

SEQ ID NO: 68757 - protein, 55 aa, Homo sapiens
LLSVVVLLHALLAMGCKLYFFQSLPPENVAPPPQITSLPSNIALSPTLPQSLAPS

SEQ ID NO: 68758 - protein, 17 aa, Homo sapiens
LVQHLNLIVALIPILGL

SEQ ID NO: 68759 - protein, 25 aa, Homo sapiens
VFFQNALIFFSTLIYKFGRTEELWT

SEQ ID NO: 68760 - protein, 790 aa, Homo sapiens
LRPPLLALVGLLSLGCVLSQECTKFKVSSCRECIESGPGCTWCQKLNFTGPGDPDSIRCDTRPQLLMRGCAADDIMDPTSLAETQEDHNGGQKQLSPQKVTLYLRPGQAAAFNVTFRRAKGYPIDLYYLMDLSYSMLDDLRNVKKLGGDLLRALNEITESGRIGFGSFVDKTVLPFVNTHPDKLRNPCPNKEKECQPPFAFRHVLKLTNNSNQFQTEVGKQLISGNLDAPEGGLDAMMQVAACPEEIGWRNVTRLLVFATDDGFHFAGDGKLGAILTPNDGRCHLEDNLYKRSNEFDYPSVGQLAHKLAENNIQPIFAVTSRMVKTYEKKRPPVKHVHPAFPLLVPCVQPEQKLTEIIPKSAVGELSEDSSNVVHLIKNAYNKLSSRVFLDHNALPDTLKVTYDSFCSNGVTHRNQPRGDCDGVQINVPITFQVKVTATECIQEQSFVIRALGFTDIVTVQVLPQCECRCRDQSRDRSLCHGKGFLECGICRCDTGYIGKNCECQTQGRSSQELEGSCRKDNNSIICSGLGDCVCGQCLCHTSDVPGKLIYGQYCECDTINCERYNGQVCGGPGRGLCFCGKCRCHPGFEGSACQCERTTEGCLNPRRVECSGRGRCRCNVCECHSGYQLPLCQECPGCPSPCGKYISCAECLKFEKGPFGKNCSAACPGLQLSNNPVKGRTCKERDSEGCWVAYTLEQQDGMDRYLIYVDESRECVAGPNIAAIVGGTVAGIVLIGILLLVIWKALIHLSDLREYRRFEKEKLKSQWNNDNPLFKSATTTVMNPKFAES

SEQ ID NO: 68761 - protein, 76 aa, Homo sapiens
ISPWILAVLTLQIQSLISCWAFWTTWTQSCSSNALPQSLPAWRSSQRSTQKDPVPYQPPFLCQWGRHQPSWKPLMN

SEQ ID NO: 68762 - protein, 324 aa, Homo sapiens
VTMVVALLIVCDVPSASAQRKKEMVLSEKVSQLMEWTNKRPVIRMNGDKFRRLVKAPPRNYSVIVMFTALQLHRQCVVCKQADEEFQILANSWRYSSAFTNRIFFAMVDFDEGSDVFQMLNMNSAPTFINFPAKGKPKRGDTYELQVRGFSAEQIARWIADRTDVNIRVIRPPNYAGPLMLGLLLAVIGGLVYLRRSNMEFLFNKTGWAFAALCFVLAMTSGQMWNHIRGPPYAHKNPHTGHVNYIHGSSQAQFVAETHIVLLFNGGVTLGMVLLCEAATSDMDIGKRKIMCVAGIGLVVLFFSWMLSIFRSKYHGYPYSFLMS

SEQ ID NO: 68763 - protein, 228 aa, Homo sapiens
MGAFRALCGLALLCALSLGQRPTGGPGCGPGRLLLGTGTDARCCRVHTTRCCRDYPGEECCSEWDCMCVQPEFHCGDPCCTTCRHHPCPPGQGVQSQGKFSFGFQCIDCASGTFSGGHEGHCKPWTDCTQFGFLTVFPGNKTHNAVCVPGSPPAEPLGWLTVVLLAVAACVLLLTSAQLGLHIWQLRKTQLLLEVPPSTEDARSCQFPEEERGERSAEEKGRLGDLWV

SEQ ID NO: 68764 - protein, 19 aa, Homo sapiens
MTMVAIIITAMGMMALMTE

SEQ ID NO: 68765 - protein, 212 aa, Homo sapiens [sequence omitted]

SEQ ID NO: 68766 - protein, 216 aa, Homo sapiens
MVALLLLLSAEPVPAARSEDRYRNPKGSACSRIWQSPRFIARKRGFTVKMHCYMNSASGNVSWLWKQEMDENPQQLKLEKGRMEESQNESLATLTIQGIRFEDNGIYFCQQKCNNTSEVYQGCGTELRVMGFSTLAQLKQRNTLKDGIIMIQTLLIILFIIVPIFLLLDKDDSKAGMEEDHTYEGLDIDQTATYEDIVTLRTGEVKWSVGEHPGQE

SEQ ID NO: 68767 - protein, 94 aa, Homo sapiens [sequence omitted]

SEQ ID NO: 68768 - protein, 527 aa, Homo sapiens
MIIGALTLMIISIMEIGGFEEVKRRYMLASPDVTSILLTYNLSNTNSCNVSPKKEALKMLRNPTDEDVPWPGFILGQTPASVWYWCADQVIVQRVLAAKNIAHAKGSTLMAGFLKLLPMFIIVVPGMISRILFTDDIACINPEHCMLVCGSRAGCSNIAYPRLVMKLVPVGLRGLMMAVMIAALMSDLDSIFNSASTIFTLDVYKLIRKSASSRELMIVGRIFVAFMVVISIAWVPIIVEMQGGQMYLYIQEVADYLTPPVAALFLLAIFWKRCNEQGAFYGGMAGFVLGAVRLILAFAYRAPECDQPDNRPGFIKDIHYMYVATGLFWVTGLITVIVSLLTPPPTKEQIRTTTFWSKKNLVVKENCSPKEEPYKMQEKSILRCSENNETINHIIPNGKSEDSIKGLQPEDVNLLVTCREEGNPVASLGHSEAETPVDAYSNGQAALMGEKERKKETDDGGRYWKFIDWFCGFKSKSLSKRSLRDLMEEEAVCLQMLEETRQVKVILNIGLFAVCSLGIFMFVYFSL

SEQ ID NO: 68769 - protein, 885 aa, Homo sapiens
MIFWSFVAGVVTFYCSLGPDSLLPNIFFTIKYKPKQLGLQELFPQGHSCAVCGKVKCKRHRPSLLLENYQPWLDLKISSKVDASLSEVLELVLENFVYPWYRDVTDDESFVDELRITLRFFASVLIRRIHKVDIPSIITKKLLKAAMKHIEVIVKARQKVKNTEFLQQAALEEYGPELHVALRSRRDELHYLRKLTELLFPYILPPKATDCRSLTLLIREILSGSVFLPSLDFLADPDTVNHLLIIFIDDSPPEKATEPASPLVPFLQKFAEPRNKKPSVLKLELKQIREQQDLLFRFMNFLKQEGAVHVLQFCLTVEEFNDRILRPELSNDEMLSLHEELQKIYKTYCLDESIDKIRFDPFIVEEIQRIAEGPYIDVVKLQTMRCLFEAYEHVLSLLENVFTPMFCHSDEYFRQLLRGAESPTRNSKLNRNTQKRGESFGISRIGSKIKGVFKSTTMEGAMLPNYGVAEGEDDFIEEGIVVMEDDSPVEAVSTPNTPRNLAAWKISIPYVDFFEDPSSERKEKKERIPVFCIDVERNDRRAVGHEPEHWSVYRRYLEFYVLESKLTEFHGAFPDAQLPSKRIIGPKNYEFLKSKREEFQEYLQKLLQHPELSNSQLLADFLSPNGGETQFLDKILPDVNLGKIIKSVPGKLMKEKGQHLEPFIMNFINSCESPKPKPSRPELTILSPTSENNKKLFNDLFKNNANRAENTERKQNQNYFMEVMTVEGVYDYLMYVGRVVFQVPDWLHHLLMGTRILFKNTLEMYTDYYLQCKLEQLFQEHRLVSLITLLRDAIFCENTEPRSLQDKQKGAKQTFEEMMNYIPDLLVKCIGEETKYESIRLLFDGLQQPVLNKQLTYVLLDIVIQELFPELNKVQKEVTSVTSWM

SEQ ID NO: 68770 - protein, 781 aa, Homo sapiens
MFFIPSGLAVFTRFALKTLGQETLCSLQEADYEVASYGLQHNCLGILGEDTDYLIYDTCPYFSISELCLESLDTVMLCREKLCESLGLCVADLPLLACLLGNDIIPEGMFESFRYKCLSSYTSVKENFDKKGNIILAVSDHISKVLYLYQGEKKLEEILPLGPNKALFYKGMASYLLPGQKSPWFFQKPKGVITLDKQVISTSSDAESREEVPMCSDAESRQEVPMCTGPESRREVPVYTDSEPRQEVPMCSDPEPRQEVPTCTGPESRREVPMCSDPEPRQEVPMCTGPEARQEVPMYTDSEPRQEVPMYTDSEPRQEVPMYTGSEPRQEVPMYTGPESRQEVPMYTGPESRQEVLIRTDPESRQEIMCTGHESKQEVPICTDPISKQEDSMCTHAEINQKLPVATDFEFKLEALMCTNPEIKQEDPTNVGPEVKQQVTMVSDTEILKVARTHHVQAESYLVYNIMSSGEIECSNTLEDELDQALPSQAFIYRPIRQRVYSLLLEDCQDVTSTCLAVKEWFVYPGNPLRHPDLVRPLQMTIPGGTPSLKILWLNQEPEIQVRRLDTLLACFNLSSSREELQAVESPFQALCCLLIYLFVQVDTLCLEDLHAFIAQALCLQGKSTSQLVNLQPDYINPRAVQLGSLLVRGLTTLVLVNSACGFPWKTSDFMPWNVFDGKLFHQKYLQSEKGYAVEVLLEQNRSRLTKFHNLKAVVCKACMKENRRITGRAHWGSHHAGRWGRQGSSYHRTGSGYSRSSQGQPWRDQGPGSRQYEHDQWRRY

SEQ ID NO: 68771 - protein, 59 aa, Homo sapiens
MFIQRKFPYPLQWSLLVAVVAGSVVSYGVTRVESEKCNNLWLFLETGQLPKDRSTDQRS

SEQ ID NO: 68772 - protein, 67 aa, Homo sapiens
LIPLFVFIGTGASGATLYLLHLALFNPDVCWDRNNPEPWNKLGPNDQYKFCSVNVDYSKLKKECPDF

SEQ ID NO: 68773 - protein, 105 aa, Homo sapiens
ILIAILIVVSVIPLLRESVGILMQRTPPLLENSLPQCYQRVQQLQGVYSLQEQHFWTLCSDVYVGTLKLIVAPDADARWILSQTHNIFTQAGVRQLYVQIDFAAM

SEQ ID NO: 68774 - protein, 23 aa, Homo sapiens
ILGYFLTYWLLGLLLHCNFLPWT

SEQ ID NO: 68775 - protein, 17 aa, Homo sapiens
LPLAVGIAFFLMTFLAS

SEQ ID NO: 68776 - protein, 11 aa, Homo sapiens
IFLGVYLLGSG

SEQ ID NO: 68777 - protein, 49 aa, Homo sapiens
RWDASLLLIRFTIYCSGCFLIPVLLGPGSFAPCPAPRRGGWCGNGWARW

SEQ ID NO: 68778 - protein, 29 aa, Homo sapiens
IFCFRKLLGSFYSAAVVLSRISECLLKDH

SEQ ID NO: 68779 - protein, 41 aa, Homo sapiens
IGLNISIAGSLVYSYITFTEEQLSKQSEANNKLDIKGKGAV

SEQ ID NO: 68780 - protein, 29 aa, Homo sapiens
LGAPGLMLLGGGLVLLLHHKKYSEYQSIN

SEQ ID NO: 68781 - protein, 33 aa, Homo sapiens
IIQTLILLEGFVWMFSNCHQKVLGDHPSTSQLC

SEQ ID NO: 68782 - protein, 34 aa, Homo sapiens
LLLLVASPFLLLATPFVLCCKCKCSKGDDDPLPT

SEQ ID NO: 68783 - protein, 41 aa, Homo sapiens
LVGLSWLFLSYRPGMDLSEELMFSSEVEEYPDKEKEIKASS

SEQ ID NO: 68784 - protein, 758 aa, Homo sapiens
LGLLGAAALVTIITVPVVLLNKGTDDATADSRKTYTLTDYLKNTYRLKLYSLRWISDHEYLYKQENNILVFNAEYGNSSVFLENSTFDEFGHSINDYSISPDGQFILLEYNYVKQWRHSYTASYDIYDLNKRQLITEERIPNNTQWVTWSPVGHKLAYVWNNDIYVKIEPNLPSYRITWTGKEDIIYNGITDWVYEEEVFSAYSALWWSPNGTFLAYAQFNDTEVPLIEYSFYSDESLQYPKTVRVPYPKAGAVNPTVKFFVVNTDSLSSVTNATSIQITAPASMLIGDHYLCDVTWATQERISLQWLRRIQNYSVMDICDYDESSGRWNCLVARQHIEMSTTGWVGRFRPSEPHFTLDGNSFYKIISNEEGYRHICYFQIDKKDCTFITKGTWEVIGIEALTSDYLYYISNEYKGMPGGRNLYKIQLSDYTKVTCLSCELNPERCQYYSVSFSKEAKYYQLRCSGPGLPLYTLHSSVNDKGLRVLEDNSALDKMLQNVQMPSKKLDFIILNETKFWYQMILPPHFDKSKKYPLLLDVYAGPCSQKADTVFRLNWATYLASTENIIVASFDGRGSGYQGDKIMHAINRRLGTFEVEDQIEAARQFSKMGFVDNKRIAIWGWSYGGYVTSMVLGSGSGVFKCGIAVAPVSRWEYYDSVYTERYMGLPTPEDNLDHYRNSTVMSRAENFKQVEYLLIHGTADDNVHFQQSAQISKALVDVGVDFQAMWYTDEDHGIASSTAHQHIYTHMSHFIKQCFSLP

SEQ ID NO: 68785 - protein, 97 aa, Homo sapiens
VAGGIIGALLGTPVGGLLMAFQKYSGETVQERKQKDRKALHELKLEEWKGRLQVTEHLPEKIESSLQEDEPENDAKKIEALLNLPRNPSVIDKQDKD

SEQ ID NO: 68786 - protein, 49 aa, Homo sapiens
IYRFLPFFFVLGGTMEWIMIKVRVGQETFYDVYRRKASERQYQRRLEDE

SEQ ID NO: 68787 - protein, 19 aa, Homo sapiens
ILCSTLILVAVFKYGHFSL

SEQ ID NO: 68788 - protein, 43 aa, Homo sapiens
IPYLTGLGDLLGTGLLALCFFTDWLLKSKAELGGISELASGPP

SEQ ID NO: 68789 - protein, 94 aa, Homo sapiens
LPFLGVLALLGYLAVRPFLPKKKQQKDSLINLKIQKENPKVVNEINIEDLCLTKAAYCRCWRSKTFPACDGSHNKHNELTGDNVGPLILKKKEV

SEQ ID NO: 68790 - protein, 296 aa, Homo sapiens
LDILLLLPLLIVCSLESFVKLFIPKRRKSVTGEIVLITGAGHGIGRLTAYEFAKLKSKLVLWDINKHGLEETAAKCKGLGAKVHTFVVDCSNREDIYSSAKKVKAEIGDVSILVNNAGVVYTSDLFATQDPQIEKTFEVNVLAHFWTTKAFLPAMTKNNHGHIVTVASAAGHVSVPFLLAYCSSKFAAVGFHKTLTDELAALQITGVKTTCLCPNFVNTGFIKNPSTSLGPTLEPEEVVNRLMHGILTEQKMIFIPSSIAFLTTLERILPERFLAVLKRKISVKFDAVIGYKMKAQ

SEQ ID NO: 68791 - protein, 47 aa, Homo sapiens
LALTPLFLASAVLSWKLAKMIEAREKEQKKKQKRQENIAKAKRLKKD

SEQ ID NO: 68792 - protein, 48 aa, Homo sapiens
LVAILVAVYVSDFFKERTSFKERKEEDSHTTLHETPTTGNHYPSNHQP

SEQ ID NO: 68793 - protein, 14 aa, Homo sapiens
LFLAIFFFFWLLSI

SEQ ID NO: 68794 - protein, 16 aa, Homo sapiens
IFIFCFKLLYFMELWL

SEQ ID NO: 68795 - protein, 33 aa, Homo sapiens
MACLSFFFLAACSAATAALLRHKVKARLTKKDS

SEQ ID NO: 68796 - protein, 247 aa, Homo sapiens
LGTVVALKVVLYLLRVCLAMAWKSGGASHSELIHNLRKNGIIKTDKVFEVMLATDRSHYAKCNPYMDSPQSIGFQATISAPHMHAYALELLFDQLHEGAKALDVGSGSGILTACFARMVGCTGKVIGIDHIKELVDDSVNNVRKDDPTLLSSGRVQLVVGDGRMGYAEEAPYDAIHVGAAAPVVPQALIDQLKPGGRLILPVGPAGGNQMLEQYDKLQDGSIKMKPLMGVIYVPLTDKEKQWSRDEL

SEQ ID NO: 68797 - protein, 14 aa, Homo sapiens
ILISILKLVLEILF

SEQ ID NO: 68798 - protein, 279 aa, Homo sapiens
LLLLLLVFPATVLFRGGPRGLLAVAQDLTEDEETVEDSIIEDEDDEAEVEEDEPTDLVEDKEEEDVSGEPEASPSADTTILFVKGEDFPANNIVKFLVGFTNKGTEDFIVESLDASFRYPQDYQFYIQNFTALPLNTVVPPQRQATFEYSFIPAEPMGGRPFGLVINLNYKDLNGNVFQDAVFNQTVTVIEREDGLDGETIFMYMFLAGLGLLVIVGLHQLLESRKRKRPIQKVEMGTSSQNDVDMSWIPQETLNQINKASPRRLPRKRAQKRSVGSDE

SEQ ID NO: 68799 - protein, 58 aa, Homo sapiens
TRSPCLALLLEIVSLFSFAVPQSPTLHPLFSPILREPIQIPLPFFPCRPSYGRERCGQ

SEQ ID NO: 68800 - protein, 177 aa, Homo sapiens
VMASVFVCLLLSGLAVFFLFPRSIDVKYIGVKSAYVSYDVQKRTIYLNITNTLNITNNNYYSVEVENITAQVQFSKTVIGKARLNNITIIGPLDMKQIDYTVPTVIAEEMSYMYDFCTLISIKVHNIVLMMQVTVTTTYFGHSEQISQERYQYVDCGRNTTYQLGQSEYLNVLQPQQ

SEQ ID NO: 68801 - protein, 75 aa, Homo sapiens
LACLFCEFLTLCNIVLGQASCGICTSEACCCCCGDEMGDDCNCPCDMDCGIMDACCESSDCLEICMECCGICFPS

SEQ ID NO: 68802 - protein, 24 aa, Homo sapiens
IRNFLIYVALLRVTPFILKKLDSI

SEQ ID NO: 68803 - protein, 146 aa, Homo sapiens
VTLLFLISLAAHLSQWTRGRSRSHPGQGRSGESVEEVPLYGNLHYLQTGRLSQDPEPDQQDPTLGGPARAAEEVMCYTSLQLRPPQGRIPGPGTPVKYSEVVLDSEPKSQASGPEPELYASVCAQTRRARASFPDQAYANSQPAAS

SEQ ID NO: 68804 - protein, 51 aa, Homo sapiens
VGFCLVFATPLCCALFPQKSSIHISNLEPELRAQIHEQNPSVEVVYYNKGL

SEQ ID NO: 68805 - protein, 50 aa, Homo sapiens
LLLLLLLLPPPLPLGSFAPTPSRRPAPSPTQDVRGFSKAAGKLQSSAPAS

SEQ ID NO: 68806 - protein, 34 aa, Homo sapiens
MAIPLVFQIMFGILNGLYHYAVFEETLEKTIHEE

SEQ ID NO: 68807 - protein, 414 aa, Homo sapiens
LLQYCFLLITCLLTALEAVPIDIDKTKVQNIHPVESAKIEPPDTGLYYDEYLKQVIDVLETDKHFREKLQKADIEEIKSGRLSKELDLVSHHVRTKLDELKRQEVGRLRMLIKAKLDSLQDIGMDHQALLKQFDHLNHLNPDKFESTDLDMLIKAATSDLEHYDKTRHEEFKKYEMMKEHERREYLKTLNEEKRKEEESKFEEMKKKHENHPKVNHPGSKDQLKEVWEETDGLDPNDFDPKTFFKLHDVNSDGFLDEQELEALFTKELEKVYDPKNEEDDMVEMEEERLRMREHVMNEVDTNKDRLVTLEEFLKATEKKEFLEPDSWETLDQQQFFTEEELKEYENIIALQENELKKKADELQKQKEELQRQHDQLEAQKLEYHQVIQQMEQKKLQQGIPPSGPAGELKFEPHI

SEQ ID NO: 68808 - protein, 36 aa, Homo sapiens
VVAFGLLVLYILLASSWKRPEPGILTDRQPLLHDGE

SEQ ID NO: 68809 - protein, 955 aa, Homo sapiens
RRSWASLVLAFLGVCLGITLAVDRSNFKTCEESSFCKRQRSIRPGLSPYRALLDSLQLGPDSLTVHLIHEVTKVLLVLELQGLQKNMTRFRIDELEPRRPRYRVPDVLVADPPIARLSVSGRDENSVELTMAEGPYKIILTARPFRLDLLEDRSLLLSVNARGLLEFEHQRAPRVSFSDKVNLTLGSIWDKIKNLFSRQGSKDPAEGDGAQPEETPRDGDKPEETQGKAEKDEPGAWEETFKTHSDSKPYGPMSVGLDFSLPGMEHVYGIPEHADNLRLKVTEGGEPYRLYNLDVFQYELYNPMALYGSVPVLLAHNPHRDLGIFWLNAAETWVDISSNTAGKTLFGKMMDYLQGSGETPQTDVRWMSETGIIDVFLLLGPSISDVFRQYASLTGTQALPPLFSLGYHQSRWNYRDEADVLEVDQGFDDHNLPCDVIWLDIEHADGKRYFTWDPSRFPQPRTMLERLASKRRKLVAIVDPHIKVDSGYRVHEELRNLGLYVKTRDGSDYEGWCWPGSAGYPDFTNPTMRAWWANMFSYDNYEGSAPNLFVWNDMNEPSVFNGPEVTMLKDAQHYGGWEHRDVHNIYGLYVHMATADGLRQRSGGMERPFVLARAFFAGSQRFGAVWTGDNTAEWDHLKISIPMCLSLGLVGLSFCGADVGGFFKNPEPELLVRWYQMGAYQPFFRAHAHLDTGRREPWLLPSQHNDIIRDALGQRYSLLPFWYTLLYQAHREGIPVMRPLWVQYPQDVTTFNIDDQYLLGDALLVHPVSDSGAHGVQVYLPGQGEVWYDIQSYQKHHGPQTLYLPVTLSSIPVFQRGGTIVPRWMRVRRSSECMKDDPITLFVALSPQGTAQGELFLDDGHTFNYQTRQEFLLRRFSFSGNTLVSSSADPEGHFETPIWIERVVIIGAGKPAAVVLQTKGSPESRLSFQHDPETSVLVLRKPGINVASDWSIHLR

SEQ ID NO: 68810 - protein, 51 aa, Homo sapiens
ICFHKSVLFFSLFCLCISSNCLFKMPRIWTPSTSNRHWEGEGRKAECKMKW

SEQ ID NO: 68811 - protein, 44 aa, Homo sapiens
IWFHSHQLFHIFVVAGAFVHFHGVSNLQEFRFMIGGGCSEEDAL

SEQ ID NO: 68812 - protein, 266 aa, Homo sapiens
LLLLLLAVAVRESWQTEEKTCDLVGEKGKESEKELALVKRLKPLFNKSFESTVGQGSDTYIYIFRVCREAGNHTSGAGLVQINKSNGKETVVGRLNETHIFNGSNWIMLIYKGGDEYDNHCGKEQRRAVVMISCNRHTLADNFNPVSEERGKVQDCFYLFEMDSSLACSPEISHLSVGSILLVTFASLVAVYVVGGFLYQRLVVGAKGMEQFPHLAFWQDLGNLVADGCDFVCRSKPRNVPAAYRGVGDDQLGEESEERDDHLLPM

SEQ ID NO: 68813 - protein, 6 aa, Homo sapiens
IYFLFF

SEQ ID NO: 68814 - protein, 62 aa, Homo sapiens
KKRQPGENRVTLIFFLGGVTFAEIAALRFLSQLEDGGTEYVIATTKLMNGTSWIEALMEKPF

SEQ ID NO: 68815 - protein, 139 aa, Homo sapiens
VESFKFISGILAALSAMISLEIPQVNIMTKMDLLSKKAKKEIEKFLDPDMYSLLEDSTSDLRSKKFKKLTKAICGLIDDYSMVRFLPYDQSDEESMNIVLQHIDFAIQYGEDLEFKEPKEREDESSSMFDEYFQECQDE

SEQ ID NO: 68816 - protein, 17 aa, Homo sapiens
TTRWCTSRWKALLSTCL

SEQ ID NO: 68817 - protein, 18 aa, Homo sapiens
LPNTAATPSVPLLLLVTA

SEQ ID NO: 68818 - protein, 50 aa, Homo sapiens
VALPLQLLLLLFLLLLFLLPIREEDRSCTLANNFARSFTLMLRYNGPPPT

SEQ ID NO: 68819 - protein, 61 aa, Homo sapiens
KGQPALLYLVPCTLITASVVAWRRKEMKKFWKGNSYQMMDHLDCATNEENPVISGEQIVQQ

SEQ ID NO: 68820 - protein, 223 aa, Homo sapiens
LGLLLLPILAMLMALCVHCHRLPGSYDSTSSDSLYPRGIQFKRPHTVAPWPPAYPPVTSYPPLSQPDLLPIPRSPQPLGGSHRTPSSRRDSDGANSVASYENEEPACEDADEDEDDYHNPGYLVVLPDSTPATSTAAPSAPALSTPGIRDSAFSMESIDDYVNVPESGESAEASLDGSREYVNVSQELHPGAAKTEPAALSSQEAEEVEEEGAPDYENLQELN

SEQ ID NO: 68821 - protein, 402 aa, Homo sapiens
LEMATLLLLLGVLVVSPDALGSTTAVQTPTSGEPLVSTSEPLSSKMYTTSITSDPKADSTGDQTSALPPSTSINEGSPLWTSIGASTGSPLPEPTTYQEVSIKMSSVPQETPHATSHPAVPITANSLGSHTVTGGTITTNSPETSSRTSGAPVTTAASSLETSRGTSGPPLTMATVSLETSKGTSGPPVTMATDSLETSTGTTGPPVTMTTGSLEPSSGASGPQVSSVKLSTMMSPTTSTNASTVPFRNPDENSRGMLPVAVLVALLAVIVLVALLLLWRRRQKRRTGALVLSRGGKRNGVVDAWAGPAQVPEEGAVTVTVGGSGGDKGSGFPDGEGSSRRPTLTTFFGRRKSRQGSLAMEELKSGSGPSLKGEEEPLVASEDGAVDAPAPDEPEGGDGAAP

SEQ ID NO: 68822 - protein, 25 aa, Homo sapiens
LPLLLLLMLTCKRPSGGGDAGPPPS

SEQ ID NO: 68823 - protein, 16 aa, Homo sapiens
MLLTCVVMFLVVQYLT

SEQ ID NO: 68824 - protein, 12 aa, Homo sapiens
KSVRLFTVLWWL

SEQ ID NO: 68825 - protein, 344 aa, Homo sapiens
ILMVTGLLAYIMNYIIGKNKNSRLAQAWFNTHRELLESNFTLVGDDGTNKEATSTGKLNQENEHIYNLWCSGRVCCEGMLIQLRFLKRQDLLNVLARMMRPVSDQVQIKVTMNDEDMDTYVFAVGTRKALVRLQKEMQDLSEFCSDKPKSGAKYGLPDSLAILSEMGEVTDGMMDTKMVHFLTHYADKIESVHFSDQFSGPKIMQEEGQPLKLPDTKRTLLFTFNVPGSGNTYPKDMEALLPLMNMVIYSIDKAKKFRLNREGKQKADKNRARVEENFLKLTHVQRQEAAQSRREEKKRAEKERIMNEEDPEKQRRLEEAALRREQKKLEKKQMKMKQIKVKAM

SEQ ID NO: 68826 - protein, 46 aa, Homo sapiens
IRDGFLLPTGLSSLAQLLLLEIIEFRAAGWKTTPAAHKYYYSEVSD

SEQ ID NO: 68827 - protein, 143 aa, Homo sapiens
LGWKLFYVTGCLFVAVQNLEDWEEAIFDKSTGKVVLKTFSLYKKLLTLFRAGHDQVVVLLHDVRDVSVEEEKVRYFGKGYMVVLRLATGFSHPLTQSAVMGHRSDVEAIAKLITSFLELHCLESPTELSQSSDSEAGDPASQS

SEQ ID NO: 68828 - protein, 59 aa, Homo sapiens
VATVLLSVVVLLHALLAMGCKLYFFQSLPPENVAPPPQITSLPSNIALSPTLPQSLAPS

SEQ ID NO: 68829 - protein, 38 aa, Homo sapiens
LTFLGFVGAASFGVRRLIGVTEIEKGSSYGNQEFKKKE

SEQ ID NO: 68830 - protein, 766 aa, Homo sapiens
LRPPLLALVGLLSLGCVLSQECTKFKVSSCRECIESGPGCTWCQKLNFTGPGDPDSIRCDTRPQLLMRGCAADDIMDPTSLAETQEDHNGGQKQLSPQKVTLYLRPGQAAAFNVTFRRAKGYPIDLYYLMDLSYSMLDDLRNVKKLGGDLLRALNEITESGRIGFGSFVDKTVLPFVNTHPDKLRNPCPNKEKECQPPFAFRHVLKLTNNSNQFQTEVGKQLISGNLDAPEGGLDAMMQVAACPEEIGWRNVTRLLVFATDDGFHFAGDGKLGAILTPNDGRCHLEDNLYKRSNEFDYPSVGQLAHKLAENNIQPIFAVTSRMVKTYEKLTEIIPKSAVGELSEDSSNVVHLIKNAYNKLSSRVFLDHNALPDTLKVTYDSFCSNGVTHRNQPRGDCDGVQINVPITFQVKVTATECIQEQSFVIRALGFTDIVTVQVLPQCECRCRDQSRDRSLCHGKGFLECGICRCDTGYIGKNCECQTQGRSSQELEGSCRKDNNSIICSGLGDCVCGQCLCHTSDVPGKLIYGQYCECDTINCERYNGQVCGGPGRGLCFCGKCRCHPGFEGSACQCERTTEGCLNPRRVECSGRGRCRCNVCECHSGYQLPLCQECPGCPSPCGKYISCAECLKFEKGPFGKNCSAACPGLQLSNNPVKGRTCKERDSEGCWVAYTLEQQDGMDRYLIYVDESRECVAGPNIAAIVGGTVAGIVLIGILLLVIWKALIHLSDLREYRRFEKEKLKSQWNNDNPLFKSATTTVMNPKFAES

SEQ ID NO: 68831 - protein, 178 aa, Homo sapiens
RAIAALSFWQKVRLAWGLCFLSDPISKDDVERCKQKDLLEQMMAEMIGEFPDLHRTIVSERDVYLTYMLRQAARRLELPRASDAEPRKCVPSVVVGVVGMGHVPGIEKNWSTDLNIQEIMTVPPPSVSGRVSRLAVKAAFFGLLGYSLYWMGRRTASLVLSLPAAQYCLQRVTEARHK

SEQ ID NO: 68832 - protein, 65 aa, Homo sapiens
KLTDVAPVSFFLVLDVVYLVYESKHLHEGAKSETAEELKKVAQELEEKLNILNNNYKILQADQEL

SEQ ID NO: 68833 - protein, 554 aa, Homo sapiens
VDVMAAPALSWRLPLLILLLPLATSWASAAVNGTSQFTCFYNSRANISCVWSQDGALQDTSCQVHAWPDRRRWNQTCELLPVSQASWACNLILGAPDSQKLTTVDIVTLRVLCREGVRWRVMAIQDFKPFENLRLMAPISLQVVHVETHRCNISWEISQASHYFERHLEFEARTLSPGHTWEEAPLLTLKQKQEWICLETLTPDTQYEFQVRVKPLQGEFTTWSPWSQPLAFRTKPAALGKDTIPWLGHLLVGLSGAFGFIILVYLLINCRNTGPWLKKVLKCNTPDPSKFFSQLSSEHGGDVQKWLSSPFPSSSFSPGGLAPEISPLEVLERDKVTQLLLQQDKVPEPASLSSNHSLTSCFTNQGYFFFHLPDALEIEACQVYFTYDPYSEEDPDEGVAGAPTGSSPQPLQPLSGEDDAYCTFPSRDDLLLFSPSLLGGPSPPSTAPGGSGAGEERMPPSLQERVPRDWDPQPLGPPTPGVPDLVDFQPPPELVLREAGEEVPDAGPREGVSFPWSRPPGQGEFRALNARLPLNTDAYLSLQELQGQDPTHLV

SEQ ID NO: 68834 - protein, 201 aa, Homo sapiens
LASGILLLLWLIAPSRACTCVPPHPQTAFCNSDLVIRAKFVGTPEVNQTTLYQRYEIKMTKMYKGFQALGDAADIRFVYTPAMESVCGYFHRSHNRSEEFLIAGKLQDGLLHITTCSFVAPWNSLSLAQRRGFTKTYTVGCEECTVFPCLSIPCKLQSGTHCLWTDQLLQGSEKGFQSRHLACLPREPGLCTWQSLRSQIA

SEQ ID NO: 68835 - protein, 52 aa, Homo sapiens
IAGPVLLILVHASLRLRNLKNKIENKIESIGLKRTPMGLLLEALGQEQEAGS

SEQ ID NO: 68836 - protein, 367 aa, Homo sapiens
KPSLPFTSLLFLQLPLLGVGLNTTILTPNGNEDTTADFFLTTMPTDSLSVSTLPLPEVQCFVFNVEYMNCTWNSSSEPQPTNLTLHYWYKNSDNDKVQKCSHYLFSEEITSGCQLQKKEIHLYQTFVVQLQDPREPRRQATQMLKLQNLVIPWAPENLTLHKLSESQLELNWNNRFLNHCLEHLVQYRTDWDHSWTEQSVDYRHKFSLPSVDGQKRYTFRVRSRFNPLCGSAQHWSEWSHPIHWGSNTSKENPFLFALEAVVISVGSMGLIISLLCVYFWLERTMPRIPTLKNLEDLVTEYHGNFSAWSGVSKGLAESLQPDYSERLCLVSEIPPKGGALGEGPGASPCNQHSPYWAPPCYTLKPET

SEQ ID NO: 68837 - protein, 50 aa, Homo sapiens
MKWLFWPLLVFALVTAVCCLADGALIYRKLLFNPSGPYQKKPVHEKKEVL

SEQ ID NO: 68838 - protein, 163 aa, Homo sapiens [sequence omitted]

SEQ ID NO: 68839 - protein, 54 aa, Homo sapiens
LQILGFLILLIGTALYNGLHRPLLGRLSRGRPLAEESEQERLLGGTRTPINDAS

SEQ ID NO: 68840 - protein, 76 aa, Homo sapiens
RRCIGEELSKMQLFLFISILAHQCDFRANPNEPAKMNFSYGLTIKPKSFKVNVTLRESMELLDSAVQNLQAKETCQ

SEQ ID NO: 68841 - protein, 27 aa, Homo sapiens
TLLLTLGYVLYASAMTLLTERGKLHQP

SEQ ID NO: 68842 - protein, 43 aa, Homo sapiens
VERRFSSWIGGSILASLGTFQQMWISKQEYEEGGKQCVERKCP

SEQ ID NO: 68843 - protein, 71 aa, Homo sapiens
KVYACMMVFFLSNMIENQCMSTGAFEITLNDVPVWSKLESGHLPSMQQLVQILDNEMKLNVHMDSIPHHRS

SEQ ID NO: 68844 - protein, 82 aa, Homo sapiens [sequence omitted]

SEQ ID NO: 68845 - protein, 263 aa, Homo sapiens
IVIFTVLLQSLCVAVTYVYFTNELKQMQDKYSKSGIACFLKEDDSYWDPNDEESMNSPCWQVKWQLRQLVRKMILRTSEETISTVQEKQQNISPLVRERGPQRVAAHITGTRGRSNTLSSPNSKNEKALGRKINSWESSRSGHSFLSNLHLRNGELVIHEKGFYYIYSQTYFRFQEEIKENTKNDKQMVQYIYKYTSYPDPILLMKSARNSCWSKDAEYGLYSIYQGGIFELKENDRIFVSVTNEHLIDMDHEASFFGAFLVG

SEQ ID NO: 68846 - protein, 102 aa, Homo sapiens
IFSKAKPSVLALSIIALEIQAQKCVELTEGIECLQKHSKINGRDLTFWQELVSKCLTEYSSNKCSKPNVQKLKWIVSGRTARQLKHSYYRITHLPTIPEMVP

SEQ ID NO: 68847 - protein, 12 aa, Homo sapiens
LLYGVFALISVF

SEQ ID NO: 68848 - protein, 15 aa, Homo sapiens
LGLLLLPPLVLAGIF

SEQ ID NO: 68849 - protein, 10 aa, Homo sapiens
IFFFFWLLSI

SEQ ID NO: 68850 - protein, 82 aa, Homo sapiens
INSSLSTLGLVIMALSNKESHVPYRNSKLTYLLQNSLGGSAKMLMFVNISPLEENVSESLNSLRFASKVNQCVIGTAQANRK

SEQ ID NO: 68851 - protein, 81 aa, Homo sapiens
IRSYTKFVMGIAVSMLTYPFLLVGDLMAVNNCGLQAGLPPYSPVFKSWIHCWKYLSVQGQLFRGSSLLFRRVSSGSCFALE

SEQ ID NO: 68852 - protein, 65 aa, Homo sapiens [sequence omitted]

SEQ ID NO: 68853 - protein, 158 aa, Homo sapiens
LHGPAMVKYLLLSILGLAFLSEAAARKIPKVGHTFFQKPESCPPVPGGSMKLDIGIINENQRVSMSRNIESRSTSPWNYTVTWDPNRYPSEVVQAQCRNLGCINAQGKEDISMNSVPIQQETLVVRRKHQGCSVSFQLEKVLVTVGCTCVTPVIHHVQ

SEQ ID NO: 68854 - protein, 43 aa, Homo sapiens
LLLLIGLACLVPMSEEDYSCALSNNFARSFHPMLRYTNGPPPL

SEQ ID NO: 68855 - protein, 73 aa, Homo sapiens
RTAILSRMKIFLPVLLAALLGVERASSLMCFSCLNQKSNLYCLKPTICSDQDNYCVTVSASAGIASFPMQGIS

SEQ ID NO: 68856 - protein, 110 aa, Homo sapiens
IVGILCLPLILLLVYKQRQAASNRRAQELVRMDSNIQGIENPGFEASPPAQGIPEAKVRHPLSYVAQRQPSESGRHLLSEPSTPLSPPGPGDVFFPSLDPVPDSPNFEVI

SEQ ID NO: 68857 - protein, 11 aa, Homo sapiens
VVMVLFSLFVD

SEQ ID NO: 68858 - protein, 55 aa, Homo sapiens
IFAAFAVMTVAILLVMEGLSAFLHALRLHWVEFQNKFYSGTGYKLSPFTFAATDD

SEQ ID NO: 68859 - protein, 359 aa, Homo sapiens
KFWWHAAWGLCLVPLSLAQIDLNITCRFAGVFHVEKNGRYSISRTEAADLCKAFNSTLPTMAQMEKALSIGFETCRYGFIEGHVVIPRIHPNSICAANNTGVYILTSNTSQYDTYCFNASAPPEEDCTSVTDLPNAFDGPITITIVNRDGTRYVQKGEYRTNPEDIYPSNPTDDDVSSGSSSERSSTSGGYIFYTFSTVHPIPDEDSPWITDSTDRIPATRDQDTFHPSGGSHTTHGSESDGHSHGSQEGGANTTSGPIRTPQIPEWLIILASLLALALILAVCIAVNSRRRCGQKKKLVINSGNGAVEDRKPSGLNGEASKSQEMVHLVNKESSETPDQFMTADETRNLQNVDMKIGV

SEQ ID NO: 68860 - protein, 57 aa, Homo sapiens
LLLYYLLRSPFYDRFSEARILFLLQLLADHVPGVGLVTRPLMDYLPTWQKIYFYSWG

SEQ ID NO: 68861 - protein, 98 aa, Homo sapiens
IETSVSRIHRSIAECAVFTWTNLLVVVVELCGSEQEALDLVPLVTNVVLEEHYLIVGVVVVVDPGVIPINSRGEKQRMHLRDSFLADQLDPIYVAYNM

SEQ ID NO: 68862 - protein, 257 aa, Homo sapiens [sequence omitted]

SEQ ID NO: 68863 - protein, 50 aa, Homo sapiens
IFFLGGVTFAEIAALRFLSQLEDGGTEYVIATTKLMNGTSWIEALMEKPF

SEQ ID NO: 68864 - protein, 7 aa, Homo sapiens
ITIMLLY

SEQ ID NO: 68865 - protein, 11 aa, Homo sapiens
LGLWHWCWILC

SEQ ID NO: 68866 - protein, 38 aa, Homo sapiens
ILFLALNIAYGVLPQLLAYRCIYKPEFFIKTKAEEKVE

SEQ ID NO: 68867 - protein, 52 aa, Homo sapiens
LAEIIILVVIIVVYEKRKRPDEVPDDDEPAGPMKTNSTNNHKDKNLRQRNTN

SEQ ID NO: 68868 - protein, 67 aa, Homo sapiens
RTDPVPVTIALDSLSWLLLRLPCTTLCQVLHAVSHQDSCPGETPPSLFPLIHLPLPRSVPLFLSTLE

SEQ ID NO: 68869 - protein, 90 aa, Homo sapiens
KVSAAALAVILIATALCAPASASPYSSDTTPCCFAYIARPLPRAHIKEYFYTSGKCSNPAVVFVTRKNRQVCANPEKKWVREYINSLEMS

SEQ ID NO: 68870 - protein, 107 aa, Homo sapiens
TLTGAFGILAAHVPTLQVLRPGLVVVHAEDGTTSKYFVSSGSIAVNADSSVQLLAEEAVTLDMLDLGAAKANLEKAQAELVGTADEATRAEIQIRIEANEALVKALE

SEQ ID NO: 68871 - protein, 69 aa, Homo sapiens
IVLPIVLLVFLCLGVFLLWKNWRLKNINSINFDNPVYQKTTEDEVHICHNQDGYSYPSRQMVSLEDDVA

SEQ ID NO: 68872 - protein, 11 aa, Homo sapiens
LIVALIPILGL

SEQ ID NO: 68873 - protein, 10 aa, Homo sapiens
ILLFLDFFCV

SEQ ID NO: 68874 - protein, 403 aa, Homo sapiens
MKKVLLLLWKTVLCTLGGFEELQSMKAEKRSILGLPPLPEDSIKVIRNMRAASPPASASDLIEQQQKRGRREHKALIKQDNLDAFNERDPYKADDSREEEEENDDDNSLEGETFPLERDEVMPPPLQHPQTDRLTCPKGLPWAPKVREKDIEMFLESSRSKFIGYTLGSDTNTVVGLPRPIHESIKTLKQHKYTSIAEVQAQMEEEYLRSPLSGGEEEVEQVPAETLYQGLLPSLPQYMIALLKILLAAAPTSKAKTDSINILADVLPEEMPTTVLQSMKLGVDVNRHKEVIVKAISAVLLLLLKHFKLNHVYQVPTGLSLLSCGLGPRALLLLQPTRTGALAFDPLELCMNVLRHGPSAKAFHPWRKEGKVPRAAPFFFFFFPVGFSLNTWPSTWCLPTAFL

SEQ ID NO: 68875 - protein, 272 aa, Homo sapiens
MWGNKFGVLLFLYSVLLTKGIENIKNEIEDASEPLIDPVYGHGSQSLINLLLTGHAVSNVWDGDRECSGMKLLGIHEQAAVGFLTLMEALRYCKVGSYLKSPKFPIWIVGSETHLTVFFAKDMALVAPEAPSEQARRVFQTYDPEDNGFIPDSLLEDVMKALDLVSDPEYINLMKNKLDPEGLGIILLGPFLQEFFPDQGSSGPESFTVYHYNGLKQSNYNEKVMYVEGTAVVMGFEDPMLQTDDTPIKRCLQTKWPYIELLWTTDRSPSLN

SEQ ID NO: 68876 - protein, 96 aa, Homo sapiens
MTAAAGSAGRAAVPLLLCALLAPGGAYVLDDSDGLGREFDGIGAVSGGGATSRLLVNYPEPYRSQILDYLFKPNFGASLHILKVEIGGDGQTTDIL

SEQ ID NO: 68877 - protein, 41 aa, Homo sapiens
MQVSTAALAVLLCTMALCNQVLSAPRESMLLLWVSPLSGHG

SEQ ID NO: 68878 - protein, 23 aa, Homo sapiens
MLLSKTRFWKQLGIWLLCSWTQA

SEQ ID NO: 68879 - protein, 1281 aa, Homo sapiens
MKTVSVALVLCLNVGVDPPDVVKTTPCARLECWIDPLSMGPQKALETIGANLQKQYENWQPRARYKQSLDPTVDEVKKLCTSLRRNAKEERVLFHYNGHGVPRPTVNGEVWVFNKNYTQYIPLSIYDLQTWMGSPSIFVYDCSNAGLIVKSFKQFALQREQELEVAAINPNHPLAQMPLPPSMKNCIQLAACEATELLPMIPDLPADLFTSCLTTPIKIALRWFCMQKCVSLVPGVTLDLIEKIPGRLNDRRTPLGELNWIFTAITDTIAWNVLPRDLFQKLFRQDLLVASLFRNFLLAERIMRSYNCTPVSSPRLPPTYMHAMWQAWDLAVDICLSQLPTIIEEGTAFRHSPFFAEQLTAFQVWLTMGVENRNPPEQLPIVLQVLLSQVHRLRALDLLGRFLDLGPWAVSLALSVGIFPYVLKLLQSSARELRPLLVFIWAKILAVDSSCQADLVKDNGHKYFLSVLADPYMPAEHRTMTAFILAVIVNSYHTGQEACLQGNLIAICLEQLNDPHPLLRQWVAICLGRIWQNFDSARWCGVRDSAHEKLYSLLSDPIPEVRCAAVFALGTFVGNSAERTDHSTTIDHNVAMMLAQLVSDGSPMVRKELVVALSHLVVQYESNFCTVALQFIEEEKNYALPSPATTEGGSLTPVRDSPCTPRLRSVSSYGNIRAVATARSLNKSLQNLSLTEESGGAVAFSPGNLSTSSSASSTLGSPENEEHILSFETIDKMRRASSYSSLNSLIGVSFNSVYTQIWRVLLHLAADPYPEVSDVAMKVLNSIAYKATVNARPQRVLDTSSLTQSAPASPTNKGVHIHQAGGSPPASSTSSSSLTNDVAKQPVSRDLPSGRPGTTGPAGAQYTPHSHQFPRTRKMFDKGPEQTADDADDAAGHKSFISATVQTGFCDWSARYFAQPVMKIPEEHDLESQIRKEREWRFLRNSRVRRQAQQVIQKGITRLDDQIFLNRNPGVPSVVKFHPFTPCIAVADKDSICFWDWEKGEKLDYFHNGNPRYTRVTAMEYLNGQDCSLLLTATDDGAIRVWKNFADLEKNPEMVTAWQGLSDMLPTTRGAGMVVDWEQETGLLMSSGDVRIVRIWDTDREMKVQDIPTGADSCVTSLSCDSHRSLIVAGLGDGSIRVYDRRMALSECRVMTYREHTAWVVKASLQKRPDGHIVSVSVNGDVRIFDPRMPESVNVLQIVKGLTALDIHPQADLIACGSVNQFTAIYNSSGELINNIKYYDGFMGQRVGAISCLAFHPHWPHLAVGSNDYYISVYSVEKRVR

SEQ ID NO: 68880 - protein, 653 aa, Homo sapiens [sequence omitted]

SEQ ID NO: 68881 - protein, 53 aa, Homo sapiens
MRQSLLFLTSVVPFVLAPRPPDDPGFGPHQRLASGNHHSAVYLHEIHFFSFHT

SEQ ID NO: 68882 - protein, 498 aa, Homo sapiens
MLGFLGGVSWAMLVARTCQLYPNAAASTLVHKFFLVFSKWEWPNPVLLKQPEESNLNLPVWDPRVNPSDRYHLMPIITPAYPQQNSTYNVSTSTRTVMVEEFKQGLAVTDEILQGKSDWSKLLEPPNFFQKYRHYIVLTASASTEENHLEWVGLVESKIRVLVGNLERNEFITLAHVNPQSFPGNKEHHKDNNYVSMWFLGIIFRRVENAESVNIDLTYDIQSFTDTVYRQANNINMLKEGMKIEATHVKKKQLHHYLPAEILQKKKKQSLSDVNRSSGGLQSKRLSLDSSCLDSSRDTDNGTPFNSPASKSDSPSVGETERNSAEPAAVIVEKPLSVPPAQGLSIPVIGAKVDSTVKTVSPPTVCTIPTVVGRNVIPRITTPHNPAQGQPHLNGMSNITKTVTPKRSHSPSIDGTPKRLKDVEKFIRLESTFKDPRTAEERKRKSVDAIGGESMPIPTIDTSRKKRLPSKELPDSSSPVPANNIRVIKNSIRLTLNR

SEQ ID NO: 68883 - protein, 119 aa, Homo sapiens [sequence omitted]

SEQ ID NO: 68884 - protein, 118 aa, Homo sapiens
MPLALLVLLLLGPGGWCLAEPPRDSLREELVITPLPSGDVAATFQFRTRWDSELQREGVSHYRLFPKALGQLISKYSLRELHLSFTQGFWRTRYWGPPFLQAPSGAELWVWFQDTVTE

SEQ ID NO: 68885 - protein, 155 aa, Homo sapiens
MERIVICLMVIFLGTLVHKSSSQGQDRHMIRMRQLIDIVDQLKNYVNDLVPEFLPAPEDVETNCEWSAFSCFQKAQLKSANTGNNERIINVSIKKLKRKPPSTNAGRRQKHRLTCPSCDSYEKKPPKEFLERFKSLLQKMIHQHLSSRTHGSEDS

SEQ ID NO: 68886 - protein, 415 aa, Homo sapiens
VAGLIGASVLVVCVSVTVFVWSCCHQQAEKKQKNPPYKFIHMLKGISIYPETLSNKKKIIKVRRDKDGPGREGGRRNLLVDAAEAGLLSRDKDPRGPSSGSCIDQLPIKMDYGEELRSPITSLTPGESKTTSPSSPEEDVMLGSLTFSVDYNFPKKALVVTIQEAHGLPVMDDQTQGSDPYIKMTILPDKRHRVKTRVLRKTLDPVFDETFTFYGIPYSQLQDLVLHFLVLSFDRFSRDDVIGEVMVPLAGVDPSTGKVQLTRDIIKRNIQKCISRGELQVSLSYQPVAQRMTVVVLKARHLPKMDITGLSGNPYVKVNVYYGRKRIAKKKTHVKKCTLNPIFNESFIYDIPTDLLPDISIEFLVIDFDRTTKNEVVGRLILGAHSVTASGAEHWREVCESPRKPVAKWHSLSEY

SEQ ID NO: 68887 - protein, 35 aa, Homo sapiens
VGFGILIFSLIVTYCINAKADVLFIAPREPGAVSY

SEQ ID NO: 68888 - protein, 38 aa, Homo sapiens
IAPTILGLPAAVLIILFPPLLIPTSKYLINNRLITTQQ

SEQ ID NO: 68889 - protein, 49 aa, Homo sapiens
VQLNQALLLLPWTMHALVILKSILPQAALEEIHKFSGTYTCMNTFKGRT

SEQ ID NO: 68890 - protein, 92 aa, Homo sapiens [sequence omitted]

SEQ ID NO: 68891 - protein, 72 aa, Homo sapiens
MGVLQLLHIFWAYLILRMAHKFITGKLVEDERSDREETESSEGEEAAAGGGAKSRPLANGHPILNNNHRKND

SEQ ID NO: 68892 - protein, 729 aa, Homo sapiens
LLTTLLAVVAAASQAEVESEAGWGMVTPDLLFAEGTAAYARGDWPGVVLSMERALRSRAALRALRLRCRTQCAADFPWELDPDWSPSPAQASGAAALRDLSFFGGLLRRAACLRRCLGPPAAHSLSEEMELEFRKRSPYNYLQVAYFKINKLEKAVAAAHTFFVGNPEHMEMQQNLDYYQTMSGVKEADFKDLETQPHMQEFRLGVRLYSEEQPQEAVPHLEAALQEYFVAYEECRALCEGPYDYDGYNYLEYNADLFQAITDHYIQVLNCKQNCVTELASHPSREKPFEDFLPSHYNYLQFAYYNIGNYTQAVECAKTYLLFFPNDEVMNQNLAYYAAMLGEEHTRSIGPRESAKEYRQRSLLEKELLFFAYDVFGIPFVDPDSWTPEEVIPKRLQEKQKSERETAVRISQEIGNLMKEIETLVEEKTKESLDVSRLTREGGPLLYEGISLTMNSKLLNGSQRVVMDGVISDHECQELQRLTNVAATSGDGYRGQTSPHTPNEKFYGVTVFKALKLGQEGKVPLQSAHLYYNVTEKVRRIMESYFRLDTPLYFSYSHLVCRTAIEEVQAERKDDSHPVHVDNCILNAETLVCVKEPPAYTFRDYSAILYLNGDFDGGNFYFTELDAKTVTAEVQPQCGRAVGFSSGTENPHGVKAVTRGQRCAIALWFTLDPRHSERDRVQADDLVKMLFSPEEMDLSQEQPLDAQQGPPEPAQESLSGSESKPKDEL

SEQ ID NO: 68893 - protein, 40 aa, Homo sapiens
MAQNLSIPLAFACLLHLANEKNLKLEGTEDLSDVLVRQGD

SEQ ID NO: 68894 - protein, 544 aa, Homo sapiens
LPRRRRCFPARAPLLRVALCLLCWTPAAVRAVPELGLWLETVNDKSGPLIFRKTMFNSTDIKLSVKSFHCSGPVKFTIVWHLKYHTCHNEHSNLEELFQKHKLSVDEDFCHYLKNDNCWTTKNENLDCNSDSQVFPSLNNKELINIRNVSNQERSMDVVARTQKDGFHIFIVSIKTENTDASWNLNVSLSMIGPHGYISASDWPLMIFYMVMCIVYILYGILWLTWSACYWKDILRIQFWIAAVIFLGMLEKAVFYSEYQNISNTGLSTQGLLIFAELISAIKRTLARLLVIIVSLGYGIVKPRLGTVMHRVIGLGLLYLIFAAVEGVMRVIGGSNHLAVVLDDIILAVIDSIFVWFIFISLAQTMKTLRLRKNTVKFSLYRHFKNTLIFAVLASIVFMGWTTKTFRIAKCQSDWMERWVDDAFWSFLFSLILIVIMFLWRPSANNQRYAFMPLIDDSDDEIEEFMVTSENLTEGIKLRASKSVSNGTAKPATSENFDEDLKWVEENIPSSFTDVALPVLVDSDEEIMTRSEMAEKMFSSEKIM

SEQ ID NO: 68895 - protein, 201 aa, Homo sapiens
VLLMGLVFASVYIYRYFFLAQLARDNFFRCGVLYEDSLSSQVRTQMELEEDVKIYLDENYERINVPVPQFGGGDPADIIHDFQRGLTAYHDISLDKCYVIELNTTIVLPPRNFWELLMNVKRGTYLPQTYIIQEEMVVTEHVSDKEALGSFIYHLCNGKDTYRLRRRATRRRINKRGAKNCNAIRHFENTFVVETLICGVV

SEQ ID NO: 68896 - protein, 60 aa, Homo sapiens
ILRSQWSPALTISKVLLSICSLLCDPNPDDPLVPEIARIYKTDRDKYNRISREWTQKYAM

SEQ ID NO: 68897 - protein, 18 aa, Homo sapiens
RWWDLTVGPISLFSALLA

SEQ ID NO: 68898 - protein, 251 aa, Homo sapiens
VGLWVLSGIVAFLVVEKFVRHVKGGHGHSHGHGHAHSHTRGSHGHGRQERSTKEKQSSEEEEKETRGVQKRRGGSTVPKDGPVRPQNAEEEKRGLDLRVSGYLNLAADLAHNFTDGLAIGASFRGGRGLGILTTMTVLLHEVPHEVGDFAILVQSGCSKKQAMRLQLLTAVGALAGTACALLTEGGAVGSEIAGGAGPGWVLPFTAGGFIYVATVSVLPELLREASPLQSLLEVLGLLGGVIMMVLIAHLE

SEQ ID NO: 68899 - protein, 893 aa, Homo sapiens
IFWSFVAGVVTFYCSLGPDSLLPNIFFTIKYKPKQLGLQELFPQGHSCAVCGKVKCKRHRPSLLLENYQPWLDLKISSKVDASLSEVLELVLENFVYPWYRDVTDDESFVDELRITLRFFASVLIRRIHKVDIPSIITKKLLKAAMKHIEVIVKARQKVKNTEFLQQAALEEYGPELHVALRSRRDELHYLRKLTELLFPYILPPKATDCRSLTLLIREILSGSVFLPSLDFLADPDTVNHLLIIFIDDSPPEKATEPASPLVPFLQKFAEPRNKKPSVLKLELKQIREQQDLLFRFMNFLKQEGAVHVLQFCLTVEEFNDRILRPELSNDEMLSLHEELQKIYKTYCLDESIDKIRFDPFIVEEIQRIAEGPYIDVVKLQTMRCLFEAYEHVLSLLENVFTPMFCHSDEYFRQLLRGAESPTRNSKLNRGSLSLDDFRNTQKRGESFGISRIGSKIKGVFKSTTMEGAMLPNYGVAEGEDDFIEEGIVVMEDDSPVEAVSTPNTPRNLAAWKISIPYVDFFEDPSSERKEKKERIPVFCIDVERNDRRAVGHEPEHWSVYRRYLEFYVLESKLTEFHGAFPDAQLPSKRIIGPKNYEFLKSKREEFQEYLQKLLQHPELSNSQLLADFLSPNGGETQFLDKILPDVNLGKIIKSVPGKLMKEKGQHLEPFIMNFINSCESPKPKPSRPELTILSPTSENNKKLFNDLFKNNANRAENTERKQNQNYFMEVMTVEGVYDYLMYVGRVVFQVPDWLHHLLMGTRILFKNTLEMYTDYYLQCKLEQLFQEHRLVSLITLLRDAIFCENTEPRSLQDKQKGAKQTFEEMMNYIPDLLVKCIGEETKYESIRLLFDGLQQPVLNKQLTYVLLDIVIQELFPELNKVQKEVTSVTSWM

SEQ ID NO: 68900 - protein, 259 aa, Homo sapiens
LPLLLGLSLGCTGAGGFVAHVESTCLLDDAGTPKDFTYCISFNKDLLTCWDPEENKMAPCEFGVLNSLANVLSQHLNQKDTLMQRLRNGLQNCATHTQPFWGSLTNRTRPPSVQVAKTTPFNTREPVMLACYVWGFYPAEVTITWRKNGKLVMPHSSAHKTAQPNGDWTYQTLSHLALTPSYGDTYTCVVEHTGAPEPILRDWTPGLSPMQTLKVSVSAVTLGLGLIIFSLGVISWRRAGHSSYTPLPGSNYSEGWHIS

SEQ ID NO: 68901 - protein, 24 aa, Homo sapiens
VGGMALGVAGLAGLIGLAVSKSKS

SEQ ID NO: 68902 - protein, 30 aa, Homo sapiens
IPSLFLSHVLALGLGIYIGKRLSTPSASTY

SEQ ID NO: 68903 - protein, 38 aa, Homo sapiens
MGLKMLMMMALLVPLVYTIKRHKWSVLKSRKLAYRPPK

SEQ ID NO: 68904 - protein, 444 aa, Homo sapiens
ILILWIIRLLFSKTYKLQERSDLTVKEKEELIEEWQPEPLVPPVPKDHPALNYNIVSGPPSHKTVVNGKECINFASFNFLGLLDNPRVKAAALASLKKYGVGTCGPRGFYGTFDVHLDLEDRLAKFMKTEEAIIYSYGFATIASAIPAYSKRGDIVFVDRAACFAIQKGLQASRSDIKLFKHNDMADLERLLKEQEIEDQKNPRKARVTRRFIVVEGLYMNTGTICPLPELVKLKYKYKARIFLEESLSFGVLGEHGRGVTEHYGINIDDIDLISANMENALASIGGFCCGRSFVIDHQRLSGQGYCFSASLPPLLAAAAIEALNIMEENPGIFAVLKEKCGQIHKALQGISGLKVVGESLSPAFHLQLEESTGSREQDVRLLQEIVDQCMNRSIALTQARYLEKEEKCLPPPSIRVVVTVEQTEEELERAASTIKEVAQAVLL

SEQ ID NO: 68905 - protein, 71 aa, Homo sapiens
LGWLCLLLLPIPLIVWVKRKEVQKTCRKHRKENQGSHESPTLNPMESCSIAQAGVQGCNHGSLQPQSPGLK

SEQ ID NO: 68906 - protein, 223 aa, Homo sapiens
VQARIRMVLAYLFAQLSLWSRGVHGGLLVLGSANVDESLLGYLTKYDCSSADINPIGGISKTDLRAFVQFCIQRFQLPALQSILLAPATAELEPLADGQVSQTDEEDMGMTYAELSVYGKLRKVAKMGPYSMFCKLLGMWRHICTPRQVADKVKRFFSKYSMNRHKMTTLTPAYHAENYSPEDNRFDLRPFLYNTSWPWQFRCIENQVLQLERAEPQSLDGVD

SEQ ID NO: 68907 - protein, 568 aa, Homo sapiens
RAGLGMCALAAALVVHCYSKSPSNKDAALLEAARANNMQEVSRLLSEGADVNAKHRLGWTALMVAAINRNNSVVQVLLAAGADPNLGDDFSSVYKTAKEQGIHSLEVLITREDDFNNRLNNRASFKGCTALHYAVLADDYRTVKELLDGGANPLQRNEMGHTPLDYAREGEVMKLLRTSEAKYQEKQRKREAEERRRFPLEQRLKEHIIGQESAIATVGAAIRRKENGWYDEEHPLVFLFLGSSGIGKTELAKQTAKYMHKDAKKGFIRLDMSEFQERHEVAKFIGSPPGYVGHEEGGQLTKKLKQCPNAVVLFDEVDKAHPDVLTIMLQLFDEGRLTDGKGKTIDCKDAIFIMTSNVASDEIAQHALQLRQEALEMSRNRIAENLGDVQISDKITISKNFKENVIRPILKAHFRRDEFLGRINEIVYFLPFCHSELIQLVNKELNFWAKRAKQRHNITLLWDREVADVLVDGYNVHYGARSIKHEVERRVVNQLAAAYEQDLLPGGCTLRITVEDSDKQLLKSPELPSPQAEKRLPKLRLEIIDKDSKTRRLDIRAPLHPEKVCNTI

SEQ ID NO: 68908 - protein, 771 aa, Homo sapiens
LGLPTCLWLELAGLFLLVPWVMGLAGTGGPDGQGTGGPSWAVHLESLEGDGEEETLEQQADALAQAAGLVNAGRIGELQGHYLFVQPAGHRPALEVEAIRQQVEAVLAGHEAVRWHSEQRLLRRAKRSVHFNDPKYPQQWHLNNRRSPGRDINVTGVWERNVTGRGVTVVVVDDGVEHTIQDIAPNYSPEGSYDLNSNDPDPMPHPDVENGNHHGTRCAGEIAAVPNNSFCAVGVAYGSRIAGIRVLDGPLTDSMEAVAFNKHYQINDIYSCSWGPDDDGKTVDGPHQLGKAALQHGVIAGRQGFGSIFVVASGNGGQHNDNCNYDGYANSIYTVTIGAVDEEGRMPFYAEECASMLAVTFSGGDKMLRSIVTTDWDLQKGTGCTEGHTGTSAAAPLAAGMIALMLQVRPCLTWRDVQHIIVFTATRYEDRRAEWVTNEAGFSHSHQHGFGLLNAWRLVNAAKIWTSVPYLASYVSPVLKENKAIPQSPRSLEVLWNVSRMDLEMSGLKTLEHVAVTVSITHPRRGSLELKLFCPSGMMSLIGAPRSMDSDPNGFNDWTFSTVRCWGERARGTYRLVIRDVGDESFQVGILRQWQLTLYGSVWSAVDIRDRQRLLESAMSGKYLHDDFALPCPPGLKIPEEDGYTITPNTLKTLVLVGCFTVFWTVYYMLEVYLSQRNVASNQVCRSGPCHWPHRSRKAKEEGTELESVPLCSSKDPDEVETESRGPPTTSDLLAPDLLEQGDWSLSQNKSALDCPHQHLDVPHGKEEQIC

SEQ ID NO: 68909 - protein, 420 aa, Homo sapiens
KRSGWSRAALLQLLLGVNLVVMPPTRARSLRFVTLLYRHGDRSPVKTYPKDPYQEEEWPQGFGQLTKEGMLQHWELGQALRQRYHGFLNTSYHRQEVYVRSTDFDRTLMSAEANLAGLFPPNGMQRFNPNISWQPIPVHTVPITEDRLLKFPLGPCPRYEQLQNETRQTPEYQNESSRNAQFLDMVANETGLTDLTLETVWNVYDTLFCEQTHGLRLPPWASPQTMQRLSRLKDFSFRFLFGIYQQAEKARLQGGVLLAQIRKNLTLMATTSQLPKLLVYSAHDTTLVALQMALDVYNGEQAPYASCHIFELYQEDSGNFSVEMYFRNESDKAPWPLSLPGCPHRCPLQDFLRLTEPVVPKDWQQECQLASGPADTEVIVALAVCGSILFLLIVLLLTVLFRMQAQPPGYRHVADGEDHA

SEQ ID NO: 68910 - protein, 58 aa, Homo sapiens
IFASSLFLLALMFLGLQRRQAPTGLGLLQAERWETTSCADTQSSHLHEDRTARVSQPS

SEQ ID NO: 68911 - protein, 129 aa, Homo sapiens
LLLIFLAVSLPLLATDPSSFYSIEKDGYNNNIHCLTKAIIQVSAALFTLYNKNIETHLKEFLVVASVSLLQLGQETDKLKTRNRESISLLMRLVVEESSFLTLDMLESCFPYVLLRNAYREVSRAFHLN

SEQ ID NO: 68912 - protein, 71 aa, Homo sapiens
ILGVLSLLLLVTGAFGFHLWRRQWRPRRFSALEQGIHPPQAQSKIEELEQEPEPEPEPEPEPEPEPEPEQL

SEQ ID NO: 68913 - protein, 1035 aa, Homo sapiens
LRWGPRRRPPLLPLLLLLLPPPPRVGGFNLDAEAPAVLSGPPGSFFGFSVEFYRPGTDGVSVLVGAPKANTSQPGVLQGGAVYLCPWGASPTQCTPIEFDSKGSRLLESSLSSSEGEEPVEYKSLQWFGATVRAHGSSILACAPLYSWRTEKEPLSDPVGTCYLSTDNFTRILEYAPCRSDFSWAAGQGYCQGGFSAEFTKTGRVVLGGPGSYFWQGQILSATQEQIAESYYPEYLINLVQGQLQTRQASSIYDDSYLGYSVAVGEFSGDDTEDFVAGVPKGNLTYGYVTILNGSDIRSLYNFSGEQMASYFGYAVAATDVNGDGLDDLLVGAPLLMDRTPDGRPQEVGRVYVYLQHPAGIEPTPTLTLTGHDEFGRFGSSLTPLGDLDQDGYNDVAIGAPFGGETQQGVVFVFPGGPGGLGSKPSQVLQPLWAASHTPDFFGSALRGGRDLDGNGYPDLIVGSFGVDKAVVYRGRPIVSASASLTIFPAMFNPEERSCSLEGNPVACINLSFCLNASGKHVADSIGFTVELQLDWQKQKGGVRRALFLASRQATLTQTLLIQNGAREDCREMKIYLRNESEFRDKLSPIHIALNFSLDPQAPVDSHGLRPALHYQSKSRIEDKAQILLDCGEDNICVPDLQLEVFGEQNHVYLGDKNALNLTFHAQNVGEGGAYEAELRVTAPPEAEYSGLVRHPGNFSSLSCDYFAVNQSRLLVCDLGNPMKAGASLWGGLRFTVPHLRDTKKTIQFDFQILSKNLNNSQSDVVSFRLSVEAQAQVTLNGVSKPEAVLFPVSDWHPRDQPQKEEDLGPAVHHVYELINQGPSSISQGVLELSCPQALEGQQLLYVTRVTGLNCTTNHPINPKGLELDPEGSLHHQQKREAPSRSSASSGPQILKCPEAECFRLRCELGPLHQQESQSLQLHFRVWAKTFLQREHQPFSLQCEAVYKALKMPYRILPRQLPQKERQVATAVQWTKAEGSYGVPLWIIILAILFGLLLLGLLIYILYKLGFFKRSLPYGTAMEKAQLKPPATSDA

SEQ ID NO: 68914 - protein, 797 aa, Homo sapiens
VALPMVLVLLLVLSRGESELDAKIPSTGDATEWRNPHLSMLGSCQPAPSCQKCILSHPSCAWCKQLNFTASGEAEARRCARREELLARGCPLEELEEPRGQQEVLQDQPLSQGARGEGATQLAPQRVRVTLRPGEPQQLQVRFLRAEGYPVDLYYLMDLSYSMKDDLERVRQLGHALLVRLQEVTHSVRIGFGSFVDKTVLPFVSTVPSKLRHPCPTRLERCQSPFSFHHVLSLTGDAQAFEREVGRQSVSGNLDSPEGGFDAILQAALCQEQIGWRNVSRLLVFTSDDTFHTAGDGKLGGIFMPSDGHCHLDSNGLYSRSTEFDYPSVGQVAQALSAANIQPIFAVTSAALPVYQELSKLIPKSAVGELSEDSSNVVQLIMDAYNSLSSTVTLEHSSLPPGVHISYESQCEGPEKREGKAEDRGQCNHVRINQTVTFWVSLQATHCLPEPHLLRLRALGFSEELIVELHTLCDCNCSDTQPQAPHCSDGQGHLQCGVCSCAPGRLGRLCECSVAELSSPDLESGCRAPNGTGPLCSGKGHCQCGRCSCSGQSSGHLCECDDASCERHEGILCGGFGRCQCGVCHCHANRTGRACECSGDMDSCISPEGGLCSGHGRCKCNRCQCLDGYYGALCDQCPGCKTPCERHRDCAECGAFRTGPLATNCSTACAHTNVTLALAPILDDGWCKERTLDNQLFFFLVEDDARGTVVLRVRPQEKGADHTQAIVLGCVGGIVAVGLGLVLAYRLSVEIYDRREYSRFEKEQQQLNWKQDSNPLYKSAITTTINPRFQEADSPTL

SEQ ID NO: 68915 - protein, 28 aa, Homo sapiens
VASFSILGMLVGLRYLEVEPVSRQKKRN

SEQ ID NO: 68916 - protein, 491 aa, Homo sapiens
VLTYVGYGVLTLFGYLRDFLRYWRIEKCHHATEREEQKDFVSLYQDFENFYTRNLYMRIRDNWNRPICSVPGARVDIMERQSHDYNWSFKYTGNIIKGVINMGSYNYLGFARNTGSCQEAAAKVLEEYGAGVCSTRQEIGNLDKHEELEELVARFLGVEAAMAYGMGFATNSMNIPALVGKGCLILSDELNHASLVLGARLSGATIRIFKHNNMQSLEKLLKDAIVYGQPRTRRPWKKILILVEGIYSMEGSIVRLPEVIALKKKYKAYLYLDEAHSIGALGPTGRGVVEYFGLDPEDVDVMMGTFTKSFGASGGYIGGKKELIDYLRTHSHSAVYATSLSPPVVEQIITSMKCIMGQDGTSLGKECVQQLAENTRYFRRRLKEMGFIIYGNEDSPVVPLMLYMPAKIGAFGREMLKRNIGVVVVGFPATPIIESRARFCLSAAHTKEILDTALKEIDEVGDLLQLKYSRHRLVPLLDRPFDETTYEETED

SEQ ID NO: 68917 - protein, 17 aa, Homo sapiens
IFITSTRLAFTSSFWTM

SEQ ID NO: 68918 - protein, 426 aa, Homo sapiens
ISFCPALPAVVALLLHYSIDEAECFEKACRILACNDPGRRLIDQSFLAFESSCMTFGDLVNKYCQAAHKLMVAVSEDVLQVYADWQRWLFGELPLCYFARVFDVFLVEGYKVLYRVALAILKFFHKVRAGQPLESDSVKQDIRTFVRDIAKTVSPEKLLEKAFAIRLFSRKEIQLLQMANEKALKQKGITVKQKRQFVHLAVHAENFRSEIVSVREMRDIWSWVPERFALCQPLLLFSSLQHGYSLARFYFQCEGHEPTLLLIKTTQKEVCGAYLSTDWSERNKFGGKLGFFGTGECFVFRLQPEVQRYEWVVIKHPELTKPPPLMAAEPTAPLSHSASSDPADRLSPFLAARHFNLPSKTESMFMAGGSDCLIVGGGGGQALYIDGDLNRGRTSHCDTFNNQPLCSENFLIAAVEAWGFQDPDTQ

SEQ ID NO: 68919 - protein, 398 aa, Homo sapiens
TLLLLLGVLVVSPDALGSTTAVQTPTSGEPLVSTSEPLSSKMYTTSITSDPKADSTGDQTSALPPSTSINEGSPLWTSIGASTGSPLPEPTTYQEVSIKMSSVPQETPHATSHPAVPITANSLGSHTVTGGTITTNSPETSSRTSGAPVTTAASSLETSRGTSGPPLTMATVSLETSKGTSGPPVTMATDSLETSTGTTGPPVTMTTGSLEPSSGASGPQVSSVKLSTMMSPTTSTNASTVPFRNPDENSRGMLPVAVLVALLAVIVLVALLLLWRRRQKRRTGALVLSRGGKRNGVVDAWAGPAQVPEEGAVTVTVGGSGGDKGSGFPDGEGSSRRPTLTTFFGRRKSRQGSLAMEELKSGSGPSLKGEEEPLVASEDGAVDAPAPDEPEGGDGAAP

SEQ ID NO: 68920 - protein, 29 aa, Homo sapiens
ISGSICILFLIGLMCGRITKRVTRELKDR

SEQ ID NO: 68921 - protein, 2210 aa, Homo sapiens
VYASPGVLLLLCYATASLRKLRAYRPSGQRKEAAKGYEARELELAELDQWPQERESDQHVVPTAPDTEADNCIVHELTGQSSVLRRPVRPKRAEPREASPLHSLGHLIMDQSYVCALIAMMVWSITYHSWLTFVLLLWACLIWTVRSRHQLAMLCSPCILLYGMTLCCLRYVWAMDLRPELPTTLGPVSLRQLGLEHTRYPCLDLGAMLLYTLTFWLLLRQFVKEKLLKWAESPAALTEVTVADTEPTRTQTLLQSLGELVKGVYAKYWIYVCAGMFIVVSFAGRLVVYKIVYMFLFLLCLTLFQVYYSLWRKLLKAFWWLVVAYTMLVLIAVYTFQFQDFPAYWRNLTGFTDEQLGDLGLEQFSVSELFSSILVPGFFLLACILQLHYFHRPFMQLTDMEHVSLPGTRLPRWAHRQDAVSGTPLLREEQQEHQQQQQEEEEEEEDSRDEGLGVATPHQATQVPEGAAKWGLVAERLLELAAGFSDVLSRVQVFLRRLLELHVFKLVALYTVWVALKEVSVMNLLLVVLWAFALPYPRFRPMASCLSTVWTCVIIVCKMLYQLKVVNPQEYSSNCTEPFPNSTNLLPTEISQSLLYRGPVDPANWFGVRKGFPNLGYIQNHLQVLLLLVFEAIVYRRQEHYRRQHQLAPLPAQAVFASGTRQQLDQDLLGCLKYFINFFFYKFGLEICFLMAVNVIGQRMNFLVTLHGCWLVAILTRRHRQAIARLWPNYCLFLALFLLYQYLLCLGMPPALCIDYPWRWSRAVPMNSALIKWLYLPDFFRAPNSTNLISDFLLLLCASQQWQVFSAERTEEWQRMAGVNTDRLEPLRGEPNPVPNFIHCRSYLDMLKVAVFRYLFWLVLVVVFVTGATRISIFGLGYLLACFYLLLFGTALLQRDTRARLVLWDCLILYNVTVIISKNMLSLLACVFVEQMQTGFCWVIQLFSLVCTVKGYYDPKEMMDRDQDCLLPVEEAGIIWDSVCFFFLLLQRRVFLSHYYLHVRADLQATALLASRGFALYNAANLKSIDFHRRIEEKSLAQLKRQMERIRAKQEKHRQGRVDRSRPQDTLGPKDPGLEPGPDSPGGSSPPRRQWWRPWLDHATVIHSGDYFLFESDSEEEEEAVPEDPRPSAQSAFQLAYQAWVTNAQAVLRRRQQEQEQARQEQAGQLPTGGGPSQEVEPAEGPEEAAAGRSHVVQRVLSTAQFLWMLGQALVDELTRWLQEFTRHHGTMSDVLRAERYLLTQELLQGGEVHRGVLDQLYTSQAEATLPGPTEAPNAPSTVSSGLGAEEPLSSMTDDMGSPLSTGYHTRSGSEEAVTDPGEREAGASLYQGLMRTASELLLDRRLRIPELEEAELFAEGQGRALRLLRAVYQCVAAHSELLCYFIIILNHMVTASAGSLVLPVLVFLWAMLSIPRPSKRFWMTAIVFTEIAVVVKYLFQFGFFPWNSHVVLRRYENKPYFPPRILGLEKTDGYIKYDLVQLMALFFHRSQLLCYGLWDHEEDSPSKEHDKSGEEEQGAEEGPGVPAATTEDHIQVEARVGPTDGTPEPQVELRPRDTRRISLRFRRRKKEGPARKGAAAIEAEDREEEEGEEEKEAPTGREKRPSRSGGRVRAAGRRLQGFCLSLAQGTYRPLRRFFHDILHTKYRAATDVYALMFLADVVDFIIIIFGFWAFGKHSAATDITSSLSDDQVPEAFLVMLLIQFSTMVVDRALYLRKTVLGKLAFQVALVLAIHLWMFFILPAVTERMFNQNVVAQLWYFVKCIYFALSAYQIRCGYPTRILGNFLTKKYNHLNLFLFQGFRLVPFLVELRAVMDWVWTDTTLSLSSWMCVEDIYANIFIIKCSRETEKKYPQPKGQKKKKIVKYGMGGLIILFLIAIIWFPLLFMSLVRSVVGVVNQPIDVTVTLKLGGYEPLFTMSAQQPSIIPFTAQAYEELSRQFDPQPLAMQFISQYSPEDIVTAQIEGSSGALWRISPPSRAQMKRELYNGTADITLRFTWNFQRDLAKGGTVEYANEKHMLALAPNSTARRQLASLLEGTSDQSVVIPNLFPKYIRAPNGPEANPVKQLQPNEEADYLGVRIQLRREQGAGATGFLEWWVIELQECRTDCNLLPMVIFSDKVSPPSLGFLAGYGIMGLYVSIVLVIGKFVRGFFSEISHSIMFEELPCVDRILKLCQDIFLVRETRELELEEELYAKLIFLYRSPETMIKWTREKE

SEQ ID NO: 68922 - protein, 1273 aa, Homo sapiens
LALGLLLLLLCPAQVFSQSCVWYGECGIAYGDKRYNCEYSGPPKPLPKDGYDLVQELCPGFFFGNVSLCCDVRQLQTLKDNLQLPLQFLSRCPSCFYNLLNLFCELTCSPRQSQFLNVTATEDYVDPVTNQTKTNVKELQYYVGQSFANAMYNACRDVEAPSSNDKALGLLCGKDADACNATNWIEYMFNKDNGQAPFTITPVFSDFPVHGMEPMNNATKGCDESVDEVTAPCSCQDCSIVCGPKPQPPPPPAPWTILGLDAMYVIMWITYMAFLLVFFGAFFAVWCYRKRYFVSEYTPIDSNIAFSVNASDKGEASCCDPVSAAFEGCLRRLFTRWGSFCVRNPGCVIFFSLVFITACSSGLVFVRVTTNPVDLWSAPSSQARLEKEYFDQHFGPFFRTEQLIIRAPLTDKHIYQPYPSGADVPFGPPLDIQILHQVLDLQIAIENITASYDNETVTLQDICLAPLSPYNTNCTILSVLNYFQNSHSVLDHKKGDDFFVYADYHTHFLYCVRAPASLNDTSLLHDPCLGTFGGPVFPWLVLGGYDDQNYNNATALVITFPVNNYYNDTEKLQRAQAWEKEFINFVKNYKNPNLTISFTAERSIEDELNRESDSDVFTVVISYAIMFLYISLALGHMKSCRRLLVDSKVSLGIAGILIVLSSVACSLGVFSYIGLPLTLIVIEVIPFLVLAVGVDNIFILVQAYQRDERLQGETLDQQLGRVLGEVAPSMFLSSFSETVAFFLGALSVMPAVHTFSLFAGLAVFIDFLLQITCFVSLLGLDIKRQEKNRLDIFCCVRGAEDGTSVQASESCLFRFFKNSYSPLLLKDWMRPIVIAIFVGVLSFSIAVLNKVDIGLDQSLSMPDDSYMVDYFKSISQYLHAGPPVYFVLEEGHDYTSSKGQNMVCGGMGCNNDSLVQQIFNAAQLDNYTRIGFAPSSWIDDYFDWVKPQSSCCRVDNITDQFCNASVVDPACVRCRPLTPEGKQRPQGGDFMRFLPMFLSDNPNPKCGKGGHAAYSSAVNILLGHGTRVGATYFMTYHTVLQTSADFIDALKKARLIASNVTETMGINGSAYRVFPYSVFYVFYEQYLTIIDDTIFNLGVSLGAIFLVTMVLLGCELWSAVIMCATIAMVLVNMFGVMWLWGISLNAVSLVNLVMSCGISVEFCSHITRAFTVSMKGSRVERAEEALAHMGSSVFSGITLTKFGGIVVLAFAKSQIFQIFYFRMYLAMVLLGATHGLIFLPVLLSYIGPSVNKAKSCATEERYKGTERERLLNF

SEQ ID NO: 68923 - protein, 556 aa, Homo sapiens
VLENMLKASCLPLGFIVFLPAVLLLVAPPLPAADAAHEFTVYRMQQYDLQGQPYGTRNAVLNTEARTMAAEVLSRRCVLMRLLDFSYEQYQKALRQSAGAVVIILPRAMAAVPQDVVRQFMEIEPEMLAMETAVPVYFAVEDEALLSIYKQTQAASASQGSASAAEVLLRTATANGFQMVTSGVQSKAVSDWLIASVEGRLTGLGGEDLPTIVIVAHYDAFGVAPWLSLGADSNGSGVSVLLELARLFSRLYTYKRTHAAYNLLFFASGGGKFNYQGTKRWLEDNLDHTDSSLLQDNVAFVLCLDTVGRGSSLHLHVSKPPREGTLQHAFLRELETVAAHQFPEVRFSMVHKRINLAEDVLAWEHERFAIRRLPAFTLSHLESHRDGQRSSIMDVRSRVDSKTLTRNTRIIAEALTRVIYNLTEKGTPPDMPVFTEQMQIQQEQLDSVMDWLTNQPRAAQLVDKDSTFLSTLEHHLSRYLKDVKQHHVKADKRDPEFVFYDQLKQVMNAYRVKPAVFDLLLAVGIAAYLGMAYVAVQHFSLLYKTVQRLLVKAKTQ

SEQ ID NO: 68924 - protein, 527 aa, Homo sapiens
LLPLLLLLPMCWAVEVKRPRGVSLTNHHFYDESKPFTCLDGSATIPFDQVNDDYCDCKDGSDEPGTAACPNGSFHCTNTGYKPLYIPSNRVNDGVCDCCDGTDEYNSGVICENTCKEKGRKERESLQQMAEVTREGFRLKKILIEDWKKAREEKQKKLIELQAGKKSLEDQVEMLRTVKEEAEKPEREAKEQHQKLWEEQLAAAKAQQEQELAADAFKELDDDMDGTVSVTELQTHPELDTDGDGALSEAEAQALLSGDTQTDATSFYDRVWAAIRDKYRSEALPTDLPAPSAPDLTEPKEEQPPVPSSPTEEEEEEEEEEEEEAEEEEEEEDSEEAPPPLSPPQPASPAEEDKMPPYDEQTQAFIDAAQEARNKFEEAERSLKDMEESIRNLEQEISFDFGPNGEFAYLYSQCYELTTNEYVYRLCPFKLVSQKPKLGGSPTSLGTWGSWIGPDHDKFSAMKYEQGTGCWQGPNRSTTVRLLCGKETMVTSTTEPSRCEYLMELMTPAACPEPPPEAPTEDDHDEL

SEQ ID NO: 68925 - protein, 50 aa, Homo sapiens
LYKVLGVLFFAIACFLYKPLSESSDGLETCLPSQSSAPDSATDSQLQSSV

SEQ ID NO: 68926 - protein, 1399 aa, Homo sapiens
VVFGGFMVVSAIGIFLVSTFSMKETSYEEALANQRKEMAKTHHQKVEKKKKEKTVEKKGKTKKKEEKPNGKIPDHDPAPNVTVLLREPVRAPAVAVAPTPVQPPIIVAPVATVPAMPQEKLASSPKDKKKKEKKVAKVEPAVSSVVNSIQVLTSKAAILETAPKEVPMVVVPPVGAKGNTPATGTTQGKKAEGTQNQSKKAEGAPNQGRKAEGTPNQGKKTEGTPNQGKKAEGTPNQGKKAEGTPNQGKKAEGAQNQGKKVDTTPNQGKKVEGAPTQGRKAEGAQNQAKKVEGAQNQGKKAEGAQNQGKKGEGAQNQGKKAEGAQNQGKKAEGAQNQGKKAEGAQNQGKKAEGAQNQGKKAEGAQNQGKKAEGAQNQGKKVEGAQNQGKKAEGAQNQGKKAEGAQNQGKKAEGAQNQGKKAEGAQNQGKKAEGAQNQGKKAEGAQNQGKKAEGAQNQGKKVEGAQNQGKKAEGAQNQGKKAEGAQNQGKKAEGAQNQGQKGEGAQNQGKKTEGAQGKKAERSPNQGKKGEGAPIQGKKADSVANQGTKVEGITNQGKKAEGSPSEGKKAEGSPNQGKKADAAANQGKKTESASVQGRNTDVAQSPEAPKQEAPAKKKSGSKKKGEPGPPDADGPLYLPYKTLVSTVGSMVFNEGEAQRLIEILSEKAGIIQDTWHKATQKGDPVAILKRQLEEKEKLLATEQEDAAVAKSKLRELNKEMAAEKAKAAAGEAKVKKQLVAREQEITAVQARMQASYREHVKEVQQLQGKIRTLQEQLENGPNTQLARLQQENSILRDALNQATSQVESKQNAELAKLRQELSKVSKELVEKSEAVRQDEQQRKALEAKAAAFEKQVLQLQASHRESEEALQKRLDEVSRELCHTQSSHASLRADAEKAQEQQQQMAELHSKLQSSEAEVRSKCEELSGLHGQLQEARAENSQLTERIRSIEALLEAGQARDAQDVQASQAEADQQQTRLKELESQVSGLEKEAIELREAVEQQKVKNNDLREKNWKAMEALATAEQACKEKLLSLTQAKEESEKQLCLIEAQTMEALLALLPELSVLAQQNYTEWLQDLKEKGPTLLKHPPAPAEPSSDLASKLREAEETQSTLQAECDQYRSILAETEGMLRDLQKSVEEEEQVWRAKVGAAEEELQKSRVTVKHLEEIVEKLKGELESSDQVREHTSHLEAELEKHMAAASAECQNYAKEVAGLRQLLLESQSQLDAAKSEAQKQSDELALVRQQLSEMKSHVEDGDIAGAPASSPEAPPAEQDPVQLKTQLEWTEAILEDEQTQRQKLTAEFEEAQTSACRLQEELEKLRTAGPLESSETEEASQLKERLEKEKKLTSDLGRAATRLQELLKTTQEQLAREKDTVKKLQEQLEKAEDGSSSKEGTSV

SEQ ID NO: 68927 - protein, 19 aa, Homo sapiens
LLLIAVLLGPIYVPWKQKT

SEQ ID NO: 68928 - protein, 34 aa, Homo sapiens
MRKLNLPQVTWLLPLVTCQLTRSELLLLLCHREW

SEQ ID NO: 68929 - protein, 425 aa, Homo sapiens
MPLALLVLLLLGPGGWCLAEPPRDSLREELVITPLPSGDVAATFQFRTRWDSELQREGVSHYRLFPKALGQLISKYSLRELHLSFTQGFWRTRYWGPPFLQAPSGAELWVWFQDTVTDVDKSWKELSNVLSGIFCASLNFIDSTNTVTPTASFKPLGLANDTDHYFLRYAVLPREVVCTENLTPWKKLLPCSSKAGLSVLLKADRLFHTSYHSQAVHIRPVCRNARCTSISWELRQTLSVVFDAFITGQGKKDWSLFRMFSRTLTEPCPLASESRVYVDITTYNQDNETLEVHPPPTTTYQDVILGTRKTYAIYDLLDTAMINNSRNLNIQLKWKRPPENEAPPVPFLHAQRYVSGYGLQKGELSTLLYNTHPYRAFPVLLLDTVPWYLRLLHPLPACPGPAATPPPGDADSAAGQLSHQGFHPV

SEQ ID NO: 68930 - protein, 603 aa, Homo sapiens
MILFSLIVGLLTYWFLFRKKKEEVPEFTKIQTLTSSVRESSFVEKMKKTGRNIIVFYGSQTGTAEEFANRLSKDAHRYGMRGMSADPEEYDLADLSSLPEIDNALVVFCMATYGEGDPTDNAQDFYDWLQETDVDLSGVKFAVFGLGNKTYEHFNAMGKYVDKRLEQLGAQRIFELGLGDDDGNLEEDFITWREQFWPAVCEHFGVEATGEESSIRQYELVVHTDIDAAKVYMGEMGRLKSYENQKPPFDAKNPFLAAVTTNRKLNQGTERHLMHLELDISDSKIRYESGDHVAVYPANDSALVNQLGKILGADLDVVMSLNNLDEESNKKHPFPCPTSYRTALTYYLDITNPPRTNVLYELAQYASEPSEQELLRKMASSSGEGKELYLSWVVEARRHILAILQDCPSLRPPIDHLCELLPRLQARYYSIASSSKVHPNSVHICAVVVEYETKAGRINKGVATNWLRAKEPAGENGGRALVPMFVRKSQFRLPFKATTPVIMVGPGTGVAPFIGFIQERAWLRQQGKEVGETLLYYGCRRSDEDYLYREELAQFHRDGALTQLNVAFSREQSHKVYVQHLLKQDREHLWKLIEGGAHIYVCG

SEQ ID NO: 68931 - protein, 817 aa, Homo sapiens [sequence omitted]

SEQ ID NO: 68932 - protein, 254 aa, Homo sapiens
LVGMVTTCWSQVLTCLGTMLLEALDCILPPTRPTDKPLHLPLQDVYKIGGIGSVPVGRVETGVLKPGMVVTFAPVNVTTEVKSVEMHHEALSEALPGDNVGFNVKNVSVKDVRHGNVAGDSKNDPPMEAAGFTAQVIILNHPGQISTGYAPVLDCHTAHIACKFAELKEKIDHRSGKKLEDGPKFLKSVDAAIVDMVPGKPMCVESFSDYPSLGCFAVRDMRQIVTVGVIKAVDKKTAGAGKVTKSAQKAQKAK

SEQ ID NO: 68933 - protein, 27 aa, Homo sapiens
MSVIGGLLLVVALGPGGVSMDEKKKEW

SEQ ID NO: 68934 - protein, 30 aa, Homo sapiens
LAVGLTSCFVTFLLPAGWILSHLETYRRPE

SEQ ID NO: 68935 - protein, 35 aa, Homo sapiens
IWIGMGLMGFIVYKIRAADKRSKALKASAPAPGHH

SEQ ID NO: 68936 - protein, 89 aa, Homo sapiens
MLALVTLLLGASLQHIHAARGTNVGRECCLEYFKGAIPLRKLKTWYQTSEDCSRDAIVFVTVQGRAICSDPNNKRVKNAVKYLQSLERS

SEQ ID NO: 68937 - protein, 1041 aa, Homo sapiens
MLLLWLSVTCLIPFDFSRLDGNLLTQPGQARMSIMDRILQIAESYLIVSDKARDAAAVLVSRFITRPDVKQSKMAEFLDWSLCNLARSSFQTMQGVITMDGTLQALAQIFKHGKREDCLPYAATVLRCLDGCRLPESNQTLLRKLGVKLVQRLGLTFLKPKVAAWRYQRGCRSLAANLQLLTQGQSEQKPLILTEDDDEDDDVPEGVERVIEQLLVGLKDKDTVVRWSAAKGIGRMAGRLPRALADDVVGSVLDCFSFQETDKAWHGGCLALAELGRRGLLLPSRLVDVVAVILKALTYDEKRGACSVGTNVRDAACYVCWAFARAYEPQELKPFVTAISSALVIAAVFDRDINCRRAASAAFQENVGRQGTFPHGIDILTTADYFAVGNRSNCFLVISVFIAGFPEYTQPMIDHLVTMKISHWDGVIRELAARALHNLAQQAPEFSATQVFPRLLSMTLSPDLHMRHGSILACAEVAYALYKLAAQENRPVTDHLDEQAVQGLKQIHQQLYDRQLYRGLGGQLMRQAVCVLIEKLSLSKMPFRGDTVIDGWQWLINDTLRHLHLISSHSRQQMKDAAVSALAALCSEYYMKEPGEADPAIQEELITQYLAELRNPEEMTRCGFSLALGALPGFLLKGRLQQVLTGLRAVTHTSPEDVSFAESRRDGLKAIARICQTVGVKAGAPDEAVCGENVSQIYCALLGCMDDYTTDSRGDVGTWVRKAAMTSLMDLTLLLARSQPELIEAHTCERIMCCVAQQASEKIDRFRAHAASVFLTLLHFDSPPIPHVPHRGELEKLFPRSDVASVNWSAPSQAFPRITQLLGLPTYRYHVLLGLVVSLGGLTESTIRHSTQSLFEYMKGIQSDPQALGSFSGTLLQIFEDNLLNERVSVPLLKTLDHVLTHGCFDIFTTEEDHPFAVKLLALCKKEIKNSKDIQKLLSGIAVFCEMVQFPGDVRRQALLQLCLLLCHRFPLIRKTTASQVYETLLTYSDVVGADVLDEVVTVLSDTAWDAELAVVREQRNRLCDLLGVPRPQLVPQPGAC

SEQ ID NO: 68938 - protein, 76 aa, Homo sapiens
MLVGITGLFYTQLIGIITDTTSIEKMSNCCEDISRPRKPWQQTFSEVFGTRWKILWFIPFRQRQPLRVPYHFANHV

SEQ ID NO: 68939 - protein, 77 aa, Homo sapiens
LLLIILLAEVTLAILLFVYEQKLNEYVAKGLTDSIHRYHSDNSTKAAWDSIQSFVLGMSFALTLNCQIDKTSQTIGL

SEQ ID NO: 68940 - protein, 13 aa, Homo sapiens
ILFIVLFATGAFS

SEQ ID NO: 68941 - protein, 40 aa, Homo sapiens
VTCSVCCYLFWLIAILAQLNPLFGPQLKNETIWYLKYHWP

SEQ ID NO: 68942 - protein, 26 aa, Homo sapiens
LLGLFKALGWAAVYLSTCKDSKKKAE

SEQ ID NO: 68943 - protein, 20 aa, Homo sapiens
LIFLGLGLIIRQRSQKGLLH

SEQ ID NO: 68944 - protein, 56 aa, Homo sapiens
LTRSQVFQSEFFSGLMWFWILWRFWHDSEEVLGHFPYPDPSQWTDEELGIPPDDED

SEQ ID NO: 68945 - protein, 33 aa, Homo sapiens
IRWGFIPLVIYLGFKRGADPGMPEPTVLSLLWG

SEQ ID NO: 68946 - protein, 68 aa, Homo sapiens
VAMYGGLVLFSMFLLYDTQKVIKRAEVSPMYGVQKYDPINSMLSIYMDTLNIFMRVATMLATGGNRKK

SEQ ID NO: 68947 - protein, 64 aa, Homo sapiens
IVTDVIATLLLALGVFCFAGHETGRLSGAADTQALLRNDQVYQPLRDRDDAQYSHLGGNWARNK

SEQ ID NO: 68948 - protein, 66 aa, Homo sapiens
ILPGLSVMGVCLLIPGLATAYIHRFTNGGKEKRVAHFGYHWSLMERDRRISGVDRYYVSKGLENID

SEQ ID NO: 68949 - protein, 184 aa, Homo sapiens [sequence omitted]

SEQ ID NO: 68950 - protein, 4702 aa, Homo sapiens
MGVRTGLSLLFALLRQSWMMPVSGPGLSLCNDVIHTAIEVVSSLPPLSLANESKIPPMGLDCLSQVTTFLKGVTIPNSGADTLGRRLASELLLGLAAQRGSLRYLLEWIEMALGASAVVHTMEKGKLLSSQEGMISFDCFMTILMQMRRSLGSSADRSQWREPTRTSDGLCSLYEAALCLFEEVCRMASDYSRTCASPDSIQTGDAPIVSETCEVYVWGSNSSHQLVEGTQEKILQPKLAPSFSDAQTIEAGQYCTFVISTDGSVRACGKGSYGRLGLGDSNNQSTLKKLTFEPHRSIKKVSSSKGSDGHTLAFTTEGEVFSWGDGDYGKLGHGNSSTQKYPKLIQGPLQGKVVVCVSAGYRHSAAVTEDGELYTWGEGDFGRLGHGDSNSRNIPTLVKDISNVGEVSCGSSHTIALSKDGRTVWSFGGGDNGKLGHGDTNRVYKPKVIEALQGMFIRKVCAGSQSSLALTSTGQVYAWGCGACLGCGSSEATALRPKLIEELAATRIVDVSIGDSHCLALSHDNEVYAWGNNSMGQCGQGNSTGPITKPKKVSGLDGIAIQQISAGTSHSLAWTALPRDRQVVAWHRPYCVDLEESTFSHLRSFLERYCDKINSEIPPLPFPSSREHHSFLKLCLKLLSNHLALALAGGVATSILGRQAGPLRNLLFRLMDSTVPDEIQEVVIETLSVGATMLLPPLRERMELLHSLLPQGPDRWESLSKGQRMQLDIILTSLQDHTHVASLLGYSSPSDAADLSSVCTGYGNLSDQPYGTQSCHPDTHLAEILMKTLLRNLGFYTDQAFGELEKNSDKFLLGTSSSENSQPAHLHELLCSLQKQLLAFCHINNISENSSSVALLHKHLQLLLPHATDIYSRSANLLKESPWNGSVGEKLRDVIYVSAAGSMLCQIVNSLLLLPVSVARPLLSYLLDLLPPLDCLNRLLPAADLLEDQELQWPLHGGPELIDPAGLPLPQPAQSWVWLVDLERTIALLIGRCLGGMLQGSPVSPEEQDTAYWMKTPLFSDGVEMDTPQLDKCMSCLLEVALSGNEEQKPFDYKLRPEIAVYVDLALGCSKEPARSLWISMQDYAVSKDWDSATLSNESLLDTVSRFVLAALLKHTNLLSQACGESRYQPGKHLSEVYRCVYKVRSRLLACKNLELIQTRSSSRDRWISENQDSADVDPQEHSFTRTIDEEAEMEEQAERDREEGHPEPEDEEEEREHEVMTAGKIFQCFLSAREVARSRDRDRMNSGAGSGARADDPPPQSQQERRVSTDLPEGQDVYTAACNSVIHRCALLILGVSPVIDELQKRREEGQLQQPSTSASEGGGLMTRSESLTAESRLVHTSPNYRLIKSRSESDLSQPESDEEGYALSGRRNVDLDLAASHRKRGPMHSQLESLSDSWARLKHSRDWLCNSSYSFESDFDLTKSLGVHTLIENVVSFVSGDVGNAPGFKEPEESMSTSPQASIIAMEQQQLRAELRLEALHQILVLLSGMEEKGSISLAGSRLSSGFQSSTLLTSVRLQFLAGCFGLGTVGHTGGKGESGRLHHYQDGIRAAKRNIQIEIQVAVHKIYQQLSATLERALQANKHHIEAQQRLLLVTVFALSVHYQPVDVSLAISTGLLNVLSQLCGTDTMLGQPLQLLPKTGVSQLSTALKVASTRLLQILAITTGTYADKLSPKVVQSLLDLLCSQLKNLLSQTGVLHMASFGEGEQEDGEEEEKKVDSSGETEKKDFRAALRKQHAAELHLGDFLVFLRRVVSSKAIQSKMASPKWTEVLLNIASQKCSSGIPLVGNLRTRLLALHVLEAVLPACESGVEDDQMAQIVERLFSLLSDCMWETPIAQAKHAIQIKEKEQEIKLQKQGELEEEDENLPIQEVSFDPEKAQCCLVENGQILTHGSGGKGYGLASTGVTSGCYQWKFYIVKENRGNEGTCVGVSRWPVHDFNHRTTSDMWLYRAYSGNLYHNGEQTLTLSSFTQGDFITCVLDMEARTISFGKNGEEPKLAFEDVDAAELYPCVMFYSSNPGEKVKICDMQMRGTPRDLLPGDPICSPVAAVLAEATIQLIRILHRTDRWTYCINKKMMERLHKIKICIKESGQKLKKSRSVQSREENEMREEKESKEEEKGKHTRHGLADLSELQLRTLCIEVWPVLAVIGGVDAGLRVGGRCVHKQTGRHATLLGVVKEGSTSAKVQWDEAEITISFPTFWSPSDTPLYNLEPCEPLPFDVARFRGLTASVLLDLTYLTGVHEDMGKQSTKRHEKKHRHESEEKGDVEQKPESESALDMRTGLTSDDVKSQSTTSSKSENEIASFSLDPTLPSVESQHQITEGKRKNHEHMSKNHDVAQSEIRAVQLSYLYLGAMKSLSALLGCSKYAELLLIPKVLAENGHNSDCASSPVVHEDVEMRAALQFLMRHMVKRAVMRSPIKRALGLADLERAQAMIYKLVVHGLLEDQFGGKIKQEIDQQAEESDPAQQAQTPVTTSPSASSTTSFMSSSLEDTTTATTPVTDTETVPASESPGVMPLSLLRQMFSSYPTTTVLPTRRAQTPPISSLPTSPSDEVGRRQSLTSPDSQSARPANRTALSDPSSRLSTSPPPPAIAVPLLEMGFSLRQIAKAMEATGARGEADAQNITVLAMWMIEHPGHEDEEEPQSGSTADSRPGAAVLGSGGKSNDPCYLQSPGDIPSADAAEMEEGFSESPDNLDHTENAASGSGPSARGRSAVTRRHKFDLAARTLLARAAGLYRSVQAHRNQSRREGISLQQDPGALYDFNLDEELEIDLDDEAMEAMFGQDLTSDNDILGMWIPEVLDWPTWHVCESEDREEVVVCELCECSVVSFNQHMKRNHPGCGRSANRQGYRSNGSYVDGWFGGECGSGNPYYLLCGTCREKYLAMKTKSKSTSSERYKGQAPDLIGKQDSVYEEDWDMLDVDEDEKLTGEEEFELLAGPLGLNDRRIVPEPVQFPDSDPLGASVAMVTATNSMEETLMQIGCHGSVEKSSSGRITLGEQAAALANPHDRVVALRRVTAAAQVLLARTMVMRALSLLSVSGSSCSLAAGLESLGLTDIRTLVRLMCLAAAGRAGLSTSPSAMASTSERSRGGHSKANKPISCLAYLSTAVGCLASNAPSAAKLLVQLCTQNLISAATGVNLTTVDDSIQRKFLPSFLRGIAEENKLVTSPNFVVTQALVALLADKGAKLRPNYDKSEVEKKGPLELANALAACCLSSRLSSQHRQWAAQQLVRTLAAHDRDNQTTLQTLADMGGDLRKCSFIKLEAHQNRVMTCVWCNKKGLLATSGNDGTIRVWNVTKKQYSLQQTCVFNRLEGDAEESLGSPSDPSFSPVSWSISGKYLAGALEKMVNIWQVNGGKGLVDIQPHWVSALAWPEEGPATAWSGESPELLLVGRMDGSLGLIEVVDVSTMHRRELEHCYRKDVSVTCIAWFSEDRPFAVGYFDGKLLLGTKEPLEKGGIVLIDAHKDTLISMKWDPTGHILMTCAKEDSVKLWGSISGCWCCLHSLCHPSIVNGIAWCRLPGKGSKLQLLMATGCQSGLVCVWRIPQDTTQTNVTSAEGWWEQESNCQDGYRKSSGAKCVYQLRGHITPVRTVAFSSDGLALVSGGLGGLMNIWSLRDGSVLQTVVIGSGAIQTTVWIPEVGVAACSNRSKDVLVVNCTAEWAAANHVLATCRTALKQQGVLGLNMAPCMRAFLERLPMMLQEQYAYEKPHVVCGDQLVHSPYMQCLASLAVGLHLDQLLCNPPVPPHHQNCLPDPASWNPNEWAWLECFSTTIKAAEALTNGAQFPESFTVPDLEPVPEDELVFLMDNSKWINGMDEQIMSWATSRPEDWHLGGKCDVYLWGAGRHGQLAEAGRNVMVPAAAPSFSQAQQVICGQNCTFVIQANGTVLACGEGSYGRLGQGNSDDLHVLTVISALQGFVVTQLVTSCGSDGHSMALTESGEVFSWGDGDYGKLGHGNSDRQRRPRQIEALQGEEVVQMSCGFKHSAVVTSDGKLFTFGNGDYGRLGLGNTSNKKLPERVTALEGYQIGQVACGLNHTLAVSADGSMVWAFGDGDYGKLGLGNSTAKSSPQKIDVLCGIGIKKVACGTQFSVALTKDGHVYTFGQDRLIGLPEGRARNHNRPQQIPVLAGVIIEDVAVGAEHTLALASNGDVYAWGSNSEGQLGLGHTNHVREPTLVTGLQGKNVRQISAGRCHSAAWTAPPVPPRAPGVSVPLQLGLPDTVPPQYGALREVSIHTVRARLRLLYHFSDLMYSSWRLLNLSPNNQNSTSHYNAGTWGIVQGQLRPLLAPRVYTLPMVRSIGKTMVQGKNYGPQITVKRISTRGRKCKPIFVQIARQVVKLNASDLRLPSRAWKVKLVGEGADDAGGVFDDTITEMCQELETGIVDLLIPSPNATAEVGYNRDRFLFNPSACLDEHLMQFKFLGILMGVAIRTKKPLDLHLAPLVWKQLCCVPLTLEDLEEVDLLYVQTLNSILHIEDSGITEESFHEMIPLDSFVGQSADGKMVPIIPGGNSIPLTFSNRKEYVERAIEYRLHEMDRQVAAVREGMSWIVPVPLLSLLTAKQLEQMVCGMPEISVEVLKKVVRYREVDEQHQLVQWFWHTLEEFSNEERVLFMRFVSGRSRLPANTADISQRFQIMKVDRPYDSLPTSQTCFFQLRLPPYSSQLVMAERLRYAINNCRSIDMDNYMLSRNVDNAEGSDTDY

SEQ ID NO: 68951 - protein, 719 aa, Homo sapiens
MPSGTGKTVSLLALIMAYQRAYPLEVTKLIYCSRTVPEIEKVIEELRKLLNFYEKQEGEKLPFLGLALSSRKNLCIHPEVTPLRFGKDVDGKCHSLTASYVRAQYQHDTSLPHCRFYEEFDAHGREVPLPAGIYNLDDLKALGRRQGWCPYFLARYSILHANVVVYSYHYLLDPKIADLVSKELARKAVVVFDEAHNIDNVCIDSMSVNLTRRTLDRCQGNLETLQKTVLRIKETDEQRLRDEYRRLVEGLREASAARETDAHLANPVLPDEVLQEAVPGSIRTAEHFLGFLRRLLEYVKWRLRVQHVVQESPPAFLSGLAQRVCIQRKPLRFCAERLRSLLHTLEITDLADFSPLTLLANFATLVSTYAKGFTIIIEPFDDRTPTIANPILHFSCMDASLAIKPVFERFQSVIITSGTLSPLDIYPKILDFHPVTMATFTMTLARVCLCPMIIGRGNDQVAISSKFETREDIAVIRNYGNLLLEMSAVVPDGIVAFFTSYQYMESTVASWYEQGILENIQRNKLLFIETQDGAETSVALEKYQEACENGRGAILLSVARGKVSEGIDFVHHYGRAVIMFGVPYVYTQSRILKARLEYLRDQFQIRENDFLTFDAMRHAAQCVGRAIRGKTDYGLMVFADKRFARGDKRGKLPRWIQEHLTDANLNLTVDEGVQVAKYFLRQMAQPFHREDQLGLSLLSLEQLESEETLKRIEQIAQQL

SEQ ID NO: 68952 - protein, 841 aa, Homo sapiens
MGKVPHLWGQSLYILSSLLAEGFLAAGEIDPLNRRFSTSVKPDVVVQVTVLAENNHIKDLLRKHGVNVQSIADIHPIQVQPGRILSHIYAKLGRNKNMNLSGRPYRHIGVLGTSKLYVIRNQIFTFTPQFTDQHHFYLALDNEMIVEMLRIELAYLCTCWRMTGRPTLTFPISRTMLTNDGSDIHSAVLSTIRKLEDGYFGGARVKLGNLSEFLTTSFYTYLTFLDPDCDEKLFDNASEGTFSPDSDSDLVGYLEDTCNQESQDELDHYINHLLQSTSLRSYLPPLCKNTEDRHVFSAIHSTRDILSVMAKAKGLEVPFVPMTLPTKVLSAHRKSLNLVDSPQPLLEKVPESDFQWPRDDHGDVDCEKLVEQLKDCSNLQDQADILYILYVIKGPSWDTNLSGQHGVTVQNLLGELYGKAGLNQEWGLIRYISGLLRKKVEVLAEACTDLLSHQKQLTVGLPPEPREKIISAPLPPEELTKLIYEASGQDISIAVLTQEIVVYLAMYVRAQPSLFVEMLRLRIGLIIQVMATELARSLNCSGEEASESLMNLSPFDMKNLLHHILSGKEFGVERSVRPIHSSTSSPTISIHEVGHTGVTKTERSGINRLRSEMKQMTRRFSADEQFFSVGQAASSSAHSSKSARSSTPSSPTGTSSSDSGGHHIGWGERQGQWLRRRRLDGAINRVPVGFYQRVWKILQKCHGLSIDGYVLPSSTTREMTPHEIKFAVHVESVLNRVPQPEYRQLLVEAIMVLTLLSDTEMTSIGGIIHVDQIVQMASQLFLQDQVSIGAMDTLEKDQATGICHFFYDSAPSGAYGTMTYLTRAVASYLQELLPNSGCQMQ

SEQ ID NO: 68953 - protein, 7 aa, Homo sapiens
ILGLLLT

SEQ ID NO: 68954 - protein, 9 aa, Homo sapiens
MALLVLACL

SEQ ID NO: 68955 - protein, 55 aa, Homo sapiens
LTLLILALISLFSVPVIYERHQAQIDHYLGLANKNVKDAMAKIQAKIPGLKRKAE

SEQ ID NO: 68956 - protein, 33 aa, Homo sapiens
VLHLLLCASQLLLLKQLSLLFGFLRLLASERHL

SEQ ID NO: 68957 - protein, 73 aa, Homo sapiens
ISLCVNMTSKLAVALLAAFLISAALCEGAVLPRSAKELRCQCIKTYSKPFHPKFIKELRVIESGPHCANTEIM

SEQ ID NO: 68958 - protein, 124 aa, Homo sapiens
KKSGVLFLLGIILLVLIGVQGTPVVRKGRCSCISTNQGTIHLQSLKDLKQFAPSPSCEKIEIIATLKNGVQTCLNPDSADVKELIKKWEKQVSQKKKQKNGKKHQKKKVLKVRKSQRSRQKKTT

SEQ ID NO: 68959 - protein, 10 aa, Homo sapiens
IIFLFIFHYI

SEQ ID NO: 68960 - protein, 19 aa, Homo sapiens
RDRAVHELQAVLLALVLGR

SEQ ID NO: 68961 - protein, 89 aa, Homo sapiens [sequence omitted]

SEQ ID NO: 68962 - protein, 57 aa, Homo sapiens
IFVLAVGVYFIAGQDGVRQSRASDKQTLLPNDQLYQPLKDREDDQYSHLQGNQLRRN

SEQ ID NO: 68963 - protein, 167 aa, Homo sapiens
TFLSGLVLATLLSQVSPFKIPIEELEDRVFVNCNTSITWVEGTVGTLLSDITRLDLGKRILDPRGIYRCNGTDIYKDKESTVQVHYRMCQSCVELDPATVAGIIVTDVIATLLLALGVFCFAGHETGRLSGAADTQALLRNDQVYQPLRDRDDAQYSHLGGNWARNK

SEQ ID NO: 68964 - protein, 87 aa, Homo sapiens
ILLLLAFLLLPRADAGEIIGGHEAKPHSRPYMAYLMIWDQKSLKRCGGFLIRDDFVLTAAHCWGSWRERPSGPELCSPSGYLATRPR

SEQ ID NO: 68965 - protein, 85 aa, Homo sapiens
LVVLVLLAVALQATEAGPYGANMEDSVCCRDYVRYRLPLRVVKHFYWTSDSCPRPGVVLLTFRDKEICADPRVPWVKMILNKLSQ

SEQ ID NO: 68966 - protein, 25 aa, Homo sapiens
MSTAWLVFKTFFASLLPEGPPAIAN

SEQ ID NO: 68967 - protein, 12 aa, Homo sapiens
ICTILLLLYAFH

SEQ ID NO: 68968 - protein, 69 aa, Homo sapiens
IFSWGVLASLAYQRYKAGVDDFIQNYVDPTPDPNTAYASYPGASVDNYQQPPFTQNAETTEGYQPPPVY

SEQ ID NO: 68969 - protein, 31 aa, Homo sapiens
IYVALGYGFFLELTLAEALKFIDRKSSLLTE

SEQ ID NO: 68970 - protein, 673 aa, Homo sapiens
MVVILGASNILWIMFAASQAFKIETTPESRYLAQIGDSVSLTCSTTGSFPKDPEIHLSGPLEAGKPITVKCSVADVYPFDRLEIDLLKGDHLMKSQEFLEDADRKSLETKSLEVTFTPVIEDIGKVLVCRAKLHIDEMDSVPTVRQAVKELQVYISPKNTVISVNPSTKLQEGGSVTMTCSSEGLPAPEIFWSKKLDNGNLQHLSGNATLTLIAMRMEDSGIYVCEGVNLIGKNRKEVELIVQEKPFTVEISPGPRIAAQIGDSVMLTCSVMGCESPSFSWRTQIDSPLSGKVRSEGTNSTLTLSPVSFENEHSYLCTVTCGHKKLEKGIQVELYSFPRDPEIEMSGGLVNGSSVTVSCKVPSVYPLDRLEIELLKGETILENIEFLEDTDMKSLENKSLEMTFIPTIEDTGKALVCQAKLHIDDMEFEPKQRQSTQTLYVNVAPRDTTVLVSPSSILEEGSSVNMTCLSQGFPAPKILWSRQLPNGELQPLSENATLTLISTKMEDSGVYLCEGINQAGRSRKEVELIIQVTPKDIKLTAFPSESVKEGDTVIISCTCGNVPETWIILKKKAETGDTVLKSIDGAYTIRKAQLKDAGVYECESKNKVGSQLRSLTLDVQGRENNKDYFSPELLVLYFASSLIIPAIGMIIYFARKANMKGSYSLVEAQKSKV

SEQ ID NO: 68971 - protein, 1497 aa, Homo sapiens
MPRVVYCIHALSLFLFRLGLAPQIHDLYGKVKFTAEELSNMASELAKYGLQLPAFSKIGGILANELSVDEAAVHAAVLAINEAVERGVVEDTLAALQNPSALLENLREPLAAVYQEMLAQAKMEKAANARNHDDRESQDIYDHYLTQAEIQGNINHVNVHGALEVVDDALERQSPEALLKALQDPALALRGVRRDFADWYLEQLNSDREQKAQELGLVELLEKEEVQAGVAAANTKGDQEQAMLHAVQRINKAIRRRVAADTVKELMCPEAQLPPVYPVASSMYQLELAVLQQQQGELGQEELFVAVEMLSAVVLINRALEARDASGFWSSLVNPATGLAEVEGENAQRYFDALLKLRQERGMGEDFLSWNDLQATVSQVNAQTQEETDRVLAVSLINEALDKGSPEKTLSALLLPAAGLDDVSLPVAPRYHLLLVAAKRQKAQVTGDPGAVLWLEEIRQGVVRANQDTNTAQRMALGVAAINQAIKEGKAAQTERVLRNPAVALRGVVPDCANGYQRALESAMAKKQRPADTAFWVQHDMKDGTAYYFHLQTFQGIWEQPPGCPLNTSHLTREEIQSAVTKVTAAYDRQQLWKANVGFVIQLQARLRGFLVRQKFAEHSHFLRTWLPAVIKIQAHWRGYRQRKIYLEWLQYFKANLDAIIKIQAWARMWAARRQYLRRLHYFQKNVNSIVKIQAFFRARKAQDDYRILVHAPHPPLSVVRRFAHLLNQSQQDFLAEAELLKLQEEVVRKIRSNQQLEQDLNIMDIKIGLLVKNRITLQEVVSHCKKLTKRNKEQLSDMMVLDKQKGLKSLSKEKRQKLEAYQHLFYLLQTQPIYLAKLIFQMPQNKTTKFMEAVIFSLYNYASSRREAYLLLQLFKTALQEEIKSKVEQPQDVVTGNPTVVRLVVRFYRNGRGQSALQEILGKVIQDVLEDKVLSVHTDPVHLYKNWINQTEAQTGQRSHLPYDVTPEQALSHPEVQRRLDIALRNLLAMTDKFLLAITSSVDQIPYGMRYVAKVLKATLAEKFPDATDSEVYKVVGNLLYYRFLNPAVVAPDAFDIVAMAAGGALAAPQRHALGAVAQLLQHAAAGKAFSGQSQHLRVLNDYLEETHLKFRKFIHRACQVPEPEERFAVDEYSDMVAVAKPMVYITVGELVNTHRLLLEHQDCIAPDHQDPLHELLEDLGELPTIPDLIGESIAADGHTDLSKLEVSLTLTNKFEGLEADADDSNTRSLLLSTKQLLADIIQFHPGDTLKEILSLSASREQEAAHKQLMSRRQACTAQTPEPLRRHRSLTAHSLLPLAEKQRRVLRNLRRLEALGLVSARNGYQGLVDELAKDIRNQHRHRHRRKAELVKLQATLQGLSTKTTFYEEQGDYYSQYIRACLDHLAPDSKSSGKGKKQPSLHYTAAQLLEKGVLVEIEDLPASHFRNVIFDITPGDEAGKFEVNAKFLGVDMERFQLHYQDLLQLQYEGVAVMKLFNKAKVNVNLLIFLLNKKFLRK

SEQ ID NO: 68972 - protein, 195 aa, Homo sapiens
MYGKSSTRAVLLLLGIQLTALWPIAAVEIYTSRVLEAVNGTDARLKCTFSSFAPVGDALTVTWNFRPLDGGPEQFVFYYHIDPFQPMSGRFKDRVSWDGNPERYDASILLWKLQFDDNGTYTCQVKNPPDVDGVIGEIRLSVVHTVRFSEIHFLALAIGSACALMIIIVIVVVLFQHYRKKRWAERAHKVVEIKS

SEQ ID NO: 68973 - protein, 135 aa, Homo sapiens
MTGLLLMILSLIYVKGRGARESAVWNVLRILGLRPWKKHSTFGDVRKLITEEFVQMNYLKYQRVPYVEPPEYEFFWGSRASREITKMQIMEFLARVFKKDPQAWPSRYREALEEARALREANPTAHYPRSSVSED

SEQ ID NO: 68974 - protein, 10 aa, Homo sapiens
MTKLLVVSLF

SEQ ID NO: 68975 - protein, 164 aa, Homo sapiens
MSSFGYRTLTVALFTLICCPGSDEKVFEVHVRPKKLAVEPKGSLEVNCSTTCNQPEVGGLETSLDKILLDEQAQWKHYLVSNISHDTVLQCHFTCSGKQESMNSNVSVYLGCTISEPCPCRHLVTGNHHVCKTTTQSSLHPQLLPSSSLHWSRPGHLLPNRGTP

SEQ ID NO: 68976 - protein, 130 aa, Homo sapiens
MPARRLLLLLTLLLPGLGIFGSTSTVTLPETLLFVSTLDGSLHAVSKRTGSIKWTLKEDPVLQVPTHVEEPAFLPDPNDGSLYTLGSKNNEGLTKLPFTIPELVQASPCRSSDGILYMGKSSCLQKLVSL

SEQ ID NO: 68977 - protein, 377 aa, Homo sapiens
MSMSPTVIILACLGFFLDQSVWAHVGGQDKPFCSAWPSAVVPQGGHVTLRCHYRRGFNIFTLYKKDGVPVPELYNRIFWNSFLISPVTPAHAGTYRCRGFHPHSPTEWSAPSNPLVIMVTGLYEKPSLTARPGPTVRAGENVTLSCSSQSSFDIYHLSREGEAHELRLPAVPSINGTFQADFPLGPATHGETYRCFGSFHGSPYEWSDPSDPLPVSVTGNPSSSWPSPTEPSFKTGIARHLHAVIRYSVAIILFTILPFFLLHRWCSKKKDAAVMNQEPAGHRTVNREDSDEQDPQEVTYAQLDHCIFTQRKITGPSQRSKRPSTDTSVCIELPNAEPRALSPAHEHHSQALMGSSRETTALSQTQLASSNVPAAGI

SEQ ID NO: 68978 - protein, 157 aa, Homo sapiens
MLALLGLSQALNILLGLKGLAPAEISAVCEKGNFNVAHGLAWSYYIGYLRLILPELQARIRTYNQHYNNLLRGAVSQRLYILLPLDCGVPDNLSMADPNIRFLDKLPQQTGDHAGIKDRVYSNSIYELLENGQRLPQTKAVRTSEGFMWVQGNPDQS

SEQ ID NO: 68979 - protein, 142 aa, Homo sapiens
MFSHLPFDCVLLLLLLLLTRSSEVEYRAEVGQNAYLPCFYTPAAPGNLVPVCWGKGACPVFECGNVVLRTDERDVNYWTSRYWLNGDFRKGDVSLTIENVTLADSGIYCCRIQIPGIMNDEKFNLKLVIKPGEWTFACHLYE

SEQ ID NO: 68980 - protein, 227 aa, Homo sapiens
MGNPGTFKRGLLLSALSYLGFETYQVISQAAVVHATAKVEEILEQADYLYESGETEKLYQLLTQYKESEDAELLWRLARASRDVAQLSRTSEEEKKLLVYEALEYAKRALEKNESSFASHKKAIELNPKDATSIHLMGIWCYTFAEMPWYQRRIAKMLFATPPSSTYEKALGYFHRAEQGKTYLKLHNKKLAAFWLMKAKDYPAHTEEDKQIQTEAAQLLTSFSEKN

SEQ ID NO: 68981 - protein, 581 aa, Homo sapiens
MKLRRLQKALCLDLLSLSAACDALDQHNLKQNDQPMDILQIINCLTTIYDRLEQEHNNLVNVPLCVDMCLNWLLNVYDTGRTGRIRVLSFKTGIISLCKAHLEDKYRYLFKQVASSTGFCDQRRLGLLLHDSIQIPRQLGEVASFGGSNIEPSVRSCFQFANNKPEIEAALFLDWMRLEPQSMVWLPVLHRVAAAETAKHQAKCNICKECPIIGFRYRSLKHFNYDICQSCFFSGRVAKGHKMHYPMVEYCTPTTSGEDVRDFAKVLKNKFRTKRYFAKHPRMGYLPVQTVLEGDNMETPASSPQLSHDDTHSRIEHYASRLAEMENSNGSYLNDSISPNESIDDEHLLIQHYCQSLNQDSPLSQPRSPAQILISLESEERGELERILADLEEENRNLQAEYDRLKQQHEHKGLSPLPSPPEMMPTSPQSPRDAELIAEAKLLRQHKGRLEARMQILEDHNKQLESQLHRLRQLLEQPQAEAKVNGTTVSSPSTSLQRSDSSQPMLLRVVGSQTSDSMGEEDLLSPPQDTSTGLEEVMEQLNNSFPSSRGHNVGSLFHMADDLGRAMESLVSVMTDEEGAE

SEQ ID NO: 68982 - protein, 576 aa, Homo sapiens [sequence omitted]

SEQ ID NO: 68983 - protein, 237 aa, Homo sapiens
MYLLTVFLITQMIGSALFAVYLHRRLDKIEDERNLHEDFVFMKTIQRCNTGERSLSLLNCEEIKSQFEGFVKDIMLNKEETKKENSFEMQKGDQNPQIAAHVISEASSKTTSVLQWAEKGYYTMSNNLVTLENGKQLTVKRQGLYYIYAQVTFCSNREASSQAPFIASLCLKSPGRFERILLRAANTHSSAKPCGQQSIHLGGVFELQPGASVFVNVTDPSQVSHGTGFTSFGLLKL

SEQ ID NO: 68984 - protein, 20 aa, Homo sapiens
LGLFYVFGIILAPAGSLPKI

SEQ ID NO: 68985 - protein, 346 aa, Homo sapiens
KLQLLAVVAFAVAMLFLENQIQKLEESRSKLERAIARHEVREIEQRHTMDGPRQDATLDEEEDMVIIYNRVPKTASTSFTNIAYDLCAKNKYHVLHINTTKNNPVMSLQDQVRFVKNITSWKEMKPGFYHGHVSYLDFAKFGVKKKPIYINVIRDPIERLVSYYYFLRFGDDYRPGLRRRKQGDKKTFDECVAEGGSDCAPEKLWLQIPFFCGHSSECWNVGSRWAMDQAKYNLINEYFLVGVTEELEDFIMLLEAALPRFFRGATELYRTGKKSHLRKTTEKKLPTKQTIAKLQQSDIWKMENEFYEFALEQFQFIRAHAVREKDGDLYILAQNFFYEKIYPKSN

SEQ ID NO: 68986 - protein, 167 aa, Homo sapiens
IFSSVLQTSLLFLLMGLRASGKDSAPTVVSGILGGSVTLPLNISVDTEIENVIWIGPKNALAFARPKENVTIMVKSYLGRLDITKWSYSLCISNLTLNDAGSYKAQINQRNFEVTTEEEFTLFVYAPFIEKLSVHVIEGDHRTLLEGSGLESIISTLAEPRVSVREG

SEQ ID NO: 68987 - protein, 539 aa, Homo sapiens
IFSSVLQTSLLFLLMGLRASGKDSAPTVVSGILGGSVTLPLNISVDTEIENVIWIGPKNALAFARPKENVTIMVKSYLGRLDITKWSYSLCISNLTLNDAGSYKAQINQRNFEVTTEEEFTLFVYEQLQEPQVTMKSVKVSENFSCNITLMCSVKGAEKSVLYSWTPREPHASESNGGSILTVSRTPCDPDLPYICTAQNPVSQRSSLPVHVGQFCTDPGASRGGTTGETVVGVLGEPVTLPLALPACRDTEKVVWLFNTSIISKEREEAATADPLIKSRDPYKNRVWVSSQDCSLKISQLKIEDAGPYHAYVCSEASSVTSMTHVTLLIYRPERNTKLWIGLFLMVCLLCVGIFSWCIWKRKGRCSVPAFCSSQAEAPADTPEPTAGHTLYSVLSQGYEKLDTPLRPARQQPTPTSDSSSDSNLTTEEDEDRPEVHKPISGRYEVFDQVTQEGAGHDPAPEGQADYDPVTPYVTEVESVVGENTMYAQVFNLQGKTPVSQKEESSATIYCSIRKPQVVPPPQQNDLEIPESPTYENFT

SEQ ID NO: 68988 - protein, 859 aa, Homo sapiens
LLWALGLLGAGSPLPSWPLPNIGGTEEQQAESEKAPREPLEPQVLQDDLPISLKKVLQTSLPEPLRIKLELDGDSHILELLQNRELVPGRPTLVWYQPDGTRVVSEGHTLENCCYQGRVRGYAGSWVSICTCSGLRGLVVLTPERSYTLEQGPGDLQGPPIISRIQDLHLPGHTCALSWRESVHTQKPPEHPLGQRHIRRRRDVVTETKTVELVIVADHSEAQKYRDFQHLLNRTLEVALLLDTFFRPLNVRVALVGLEAWTQRDLVEISPNPAVTLENFLHWRRAHLLPRLPHDSAQLVTGTSFSGPTVGMAIQNSICSPDFSGGVNMDHSTSILGVASSIAHELGHSLGLDHDLPGNSCPCPGPAPAKTCIMEASTDFLPGLNFSNCSRRALEKALLDGMGSCLFERLPSLPPMAAFCGNMFVEPGEQCDCGFLDDCVDPCCDSLTCQLRPGAQCASDGPCCQNCQLRPSGWQCRPTRGDCDLPEFCPGDSSQCPPDVSLGDGEPCAGGQAVCMHGRCASYAQQCQSLWGPGAQPAAPLCLQTANTRGNAFGSCGRNPSGSYVSCTPRDAICGQLQCQTGRTQPLLGSIRDLLWETIDVNGTELNCSWVHLDLGSDVAQPLLTLPGTACGPGLVCIDHRCQRVDLLGAQECRSKCHGHGVCDSNRHCYCEEGWAPPDCTTQLKATSSLTTGLLLSLLVLLVLVMLGASYWYRARLHQRLCQLKGPTCQYRAAQSGPSERPGPPQRALLARGTKQASALSFPAPPSRPLPPDPVSKRLQAELADRPNPPTRPLPADPVVRSPKSQGPAKPPPPRKPLPADPQGRCPSGDLPGPGAGIPPLVVPSRPAPPPPTVSSLYL

SEQ ID NO: 68989 - protein, 16 aa, Homo sapiens
ILLLVIIILIVMKYRT

SEQ ID NO: 68990 - protein, 397 aa, Homo sapiens [sequence omitted]

SEQ ID NO: 68991 - protein, 32 aa, Homo sapiens
VIPLQLLAFHLAVLRGYDVDFPRNLAKSVTVE

SEQ ID NO: 68992 - protein, 363 aa, Homo sapiens
VGLMAFLLSFYLIFTNEGRALKTATSLAEGLSLVVSPDSIHSVAPENEGRLVHIIGALRTSKLLSDPNYGVHLPAVKLRRHVEMYQWVETEESREYTEDGQVKKETRYSYNTEWRSEIINSKNFDREIGHKNPSAMAVESFMATAPFVQIGRFFLSSGLIDKVDNFKSLSLSKLEDPHVDIIRRGDFFYHSENPKYPEVGDLRVSFSYAGLSGDDPDLGPAHVVTVIARQRGDQLVPFSTKSGDTLLLLHHGDFSAEEVFHRELRSNSMKTWGLRAAGWMAMFMGLNLMTRILYTLVDWFPVFRDLVNIGLKAFAFCVATSLTLLTVAAGWLFYRPLWALLIAGLALVPILVARTRVPAKKLE

SEQ ID NO: 68993 - protein, 12 aa, Homo sapiens
IKISFTVMLLLT

SEQ ID NO: 68994 - protein, 535 aa, Homo sapiens
LPPPLMLLLLGPLGPLSPGALPRPAQAQDVVDLDFFTQEPLHLVSPSFLSVTIDANLATDPRFLILLGSPKLRTLARGLSPAYLRFGGTKTDFLIFDPKKESTFEERSYWQSQVNQDICKYGSIPPDVEEKLRLEWPYQEQLLLREHYQKKFKNSTYSRSSVDVLYTFANCSGLDLIFGLNALLRTADLQWNSSNAQLLLDYCSSKGYNISWELGNEPNSFLKKADIFINGSQLGEDFIQLHKLLRKSTFKNAKLYGPDVGQPRRKTAKMLKSFLKAGGEVIDSVTWHHYYLNGRTATKEDFLNPDVLDIFISSVQKVFQVVESTRPGKKVWLGETSSAYGGGAPLLSDTFAAGFMWLDKLGLSARMGIEVVMRQVFFGAGNYHLVDENFDPLPDYWLSLLFKKLVGTKVLMASVQGSKRRKLRVYLHCTNTDNPRYKEGDLTLYAINLHNVTKYLRLPYPFSNKQVDKYLLRPLGPHGLLSKSVQLNGLTLKMVDDQTLPPLMEKPLRPGSSLGLPAFSYSFFVIRNAKVAACI

SEQ ID NO: 68995 - protein, 401 aa, Homo sapiens
VLSGFVLGALAFQHLNTDSDTEGFLLGEVKGEAKNSITDSQMDDVEVVYTIDIQKYIPCYQLFSFYNSSGEVNEQALKKILSNVKKNVVGWYKFRRHSDQIMTFRERLLHKNLQEHFSNQDLVFLLLTPSIITESCSTHRLEHSLYKPQKGLFHRVPLVVANLGMSEQLGYKTVSGSCMSTGFSRAVQTHSSKFFEEDGSLKEVHKINEMYASLQEELKSICKKVEDSEQAVDKLVKDVNRLKREIEKRRGAQIQAAREKNIQKDPQENIFLCQALRTFFPNSEFLHSCVMSLKNRHVSKSSCNYNHHLDVVDNLTLMVEHTDIPEASPASTPQIIKHKALDLDDRWQFKRSRLLDTQDKRSKADTGSSNQDKASKMSSPETDEEIEKMKGFGEYSRSPTF

SEQ ID NO: 68996 - protein, 529 aa, Homo sapiens
VSALLMAWFGVLSCVQAEFFTSIGHMTDLIYAEKELVQSLKEYILVEEAKLSKIKSWANKMEALTSKSAADAEGYLAHPVNAYKLVKRLNTDWPALEDLVLQDSAAGFIANLSVQRQFFPTDEDEIGAAKALMRLQDTYRLDPGTISRGELPGTKYQAMLSVDDCFGMGRSAYNEGDYYHTVLWMEQVLKQLDAGEEATTTKSQVLDYLSYAVFQLGDLHRALELTRRLLSLDPSHERAGGNLRYFEQLLEEEREKTLTNQTEAELATPEGIYERPVDYLPERDVYESLCRGEGVKLTPRRQKRLFCRYHHGNRAPQLLIAPFKEEDEWDSPHIVRYYDVMSDEEIERIKEIAKPKLARATVRDPKTGVLTVASYRVSKSSWLEEDDDPVVARVNRRMQHITGLTVKTAELLQVANYGVGGQYEPHFDFSRRPFDSGLKTEGNRLATFLNYMSDVEAGGATVFPDLGAAIWPKKGTAVFWYNLLRSGEGDYRTRHAACPVLVGCKWVSNKWFHERGQEFLRPCGSTEVD

SEQ ID NO: 68997 - protein, 431 aa, Homo sapiens
ILFVAWNALLLLFFWTRPAPGRPPSVSALDGDPASLTREVIRLAQDAEVELERQRGLLQQIGDALSSQRGRVPTAAPPAQPRVPVTPAPAVIPILVIACDRSTVRRCLDKLLHYRPSAELFPIIVSQDCGHEETAQAIASYGSAVTHIRQPDLSSIAVPPDHRKFQGYYKIARHYRWALGQVFRQFRFPAAVVVEDDLEVAPDFFEYFRATYPLLKADPSLWCVSAWNDNGKEQMVDASRPELLYRTDFFPGLGWLLLAELWAELEPKWPKAFWDDWMRRPEQRQGRACIRPEISRTMTFGRKGVSHGQFFDQHLKFIKLNQQFVHFTQLDLSYLQREAYDRDFLARVYGAPQLQVEKVRTNDRKELGEVRVQYTGRDSFKAFAKALGVMDDLKSGVPRAGYRGIVTFQFRGRRVHLAPPLTWEGYDPSWN

SEQ ID NO: 68998 - protein, 521 aa, Homo sapiens
LHFSRPASLLLLLLSLCALVSAQFIVVGPTDPILATVGENTTLRCHLSPEKNAEDMEVRWFRSQFSPAVFVYKGGRERTEEQMEEYRGRTTFVSKDISRGSVALVIHNITAQENGTYRCYFQEGRSYDEAILHLVVAGLGSKPLISMRGHEDGGIRLECISRGWYPKPLTVWRDPYGGVAPALKEVSMPDADGLFMVTTAVIIRDKSVRNMSCSINNTLLGQKKESVIFIPESFMPSVSPCAVALPIIVVILMIPIAVCIYWINKLQKEKKILSGEKEFERETREIALKELEKERVQKEEELQVKEKLQEELRWRRTFLHAVDVVLDPDTAHPDLFLSEDRRSVRRCPFRHLGESVPDNPERFDSQPCVLGRESFASGKHYWEVEVENVIEWTVGVCRDSVERKGEVLLIPQNGFWTLEMHKGQYRAVSSPDRILPLKESLCRVGVFLDYEAGDVSFYNMRDRSHIYTCPRSAFSVPVRPFFRLGCEDSPIFICPALTGANGVTVPEEGLTLHRVGTHQSL

SEQ ID NO: 68999 - protein, 465 aa, Homo sapiens
LGAPHWVAVGLLTWATLGLLVAGLGGHDDLHDDLQEDFHGHSHRHSHEDFHHGHSHAHGHGHTHESIWHGHTHDHDHGHSHEDLHHGHSHGYSHESLYHRGHGHDHEHSHGGYGESGAPGIKQDLDAVTLWAYALGATVLISAAPFFVLFLIPVESNSPRHRSLLQILLSFASGGLLGDAFLHLIPHALEPHSHHTLEQPGHGHSHSGQGPILSVGLWVLSGIVAFLVVEKFVRHVKGGHGHSHGHGHAHSHTRGSHGHGRQERSTKEKQSSEEEEKETRGVQKRRGGSTVPKDGPVRPQNAEEEKRGLDLRVSGYLNLAADLAHNFTDGLAIGASFRGGRGLGILTTMTVLLHEVPHEVGDFAILVQSGCSKKQAMRLQLLTAVGALAGTACALLTEGGAVGSEIAGGAGPGWVLPFTAGGFIYVATVSVLPELLREASPLQSLLEVLGLLGGVIMMVLIAHLE

SEQ ID NO: 69000 - protein, 717 aa, Homo sapiens
KPCGKIRNLKKMEMFTFLLTCIFLPLLRGHSLFTCEPITVPRCMKMAYNMTFFPNLMGHYDQSIAAVEMEHFLPLANLECSPNIETFLCKAFVPTCIEQIHVVPPCRKLCEKVYSDCKKLIDTFGIRWPEELECDRLQYCDETVPVTFDPHTEFLGPQKKTEQVQRDIGFWCPRHLKTSGGQGYKFLGIDQCAPPCPNMYFKSDELEFAKSFIGTVSIFCLCATLFTFLTFLIDVRRFRYPERPIIYYSVCYSIVSLMYFIGFLLGDSTACNKADEKLELGDTVVLGSQNKACTVLFMLLYFFTMAGTVWWVILTITWFLAAGRKWSCEAIEQKAVWFHAVAWGTPGFLTVMLLAMNKVEGDNISGVCFVGLYDLDASRYFVLLPLCLCVFVGLSLLLAGIISLNHVRQVIQHDGRNQEKLKKFMIRIGVFSGLYLVPLVTLLGCYVYEQVNRITWEITWVSDHCRQYHIPCPYQAKAKARPELALFMIKYLMTLIVGISAVFWVGSKKTCTEWAGFFKRNRKRDPISESRRVLQESCEFFLKHNSKVKHKKKHYKPSSHKLKVISKSMGTSTGATANHGTSAVAITSHDYLGQETLTEIQTSPETSMREVKADGASTPRLREQDCGEPASPAASISRLSGEQVDGKGQAGSVSESARSEGRISPKSDITDTGLAQSNNLQVPSSSEPSSLKGSTSLLVHPVSGVRKEQGGGCHSDT

SEQ ID NO: 69001 - protein, 55 aa, Homo sapiens
RKFPYPLQWSLLVAVVAGSVVSYGVTRVESEKCNNLWLFLETGQLPKDRSTDQRS

SEQ ID NO: 69002 - protein, 2408 aa, Homo sapiens
IFIPLVLFFILLGLRQKKPTISVKEVAFYTAAPLTSAGILPVMQSLCPDGQRDEFGFLQYANSTVTQLLERLDRVVEEGNLFDPARPSLGSELEALRQHLEALSAGPGTSGSHLDRSTVSSFSLDSVARNPQELWRFLTQNLSLPNSTAQALLAARVDPPEVYHLLFGPSSALDSQSGLHKGQEPWSRLGGNPLFRMEELLLAPALLEQLTCTPGSGELGRILTVPESQKGALQGYRDAVCSGQAAARARRFSGLSAELRNQLDVAKVSQQLGLDAPNGSDSSPQAPPPRRLQALLGDLLDAQKVLQDVDVLSALALLLPQGACTGRTPGPPASGAGGAANGTGAGAVMGPNATAEEGAPSAAALATPDTLQGQCSAFVQLWAGLQPILCGNNRTIEPEALRRGNMSSLGFTSKEQRNLGLLVHLMTSNPKILYAPAGSEVDRVILKANETFAFVGNVTHYAQVWLNISAEIRSFLEQGRLQQHLRWLQQYVAELRLHPEALNLSLDELPPALRQDNFSLPSGMALLQQLDTIDNAACGWIQFMSKVSVDIFKGFPDEESIVNYTLNQAYQDNVTVFASVIFQTRKDGSLPPHVHYKIRQNSSFTEKTNEIRRAYWRPGPNTGGRFYFLYGFVWIQDMMERAIIDTFVGHDVVEPGSYVQMFPYPCYTRDDFLFVIEHMMPLCMVISWVYSVAMTIQHIVAEKEHRLKEVMKTMGLNNAVHWVAWFITGFVQLSISVTALTAILKYGQVLMHSHVVIIWLFLAVYAVATIMFCFLVSVLYSKAKLASACGGIIYFLSYVPYMYVAIREEVAHDKITAFEKCIASLMSTTAFGLGSKYFALYEVAGVGIQWHTFSQSPVEGDDFNLLLAVTMLMVDAVVYGILTWYIEAVHPGMYGLPRPWYFPLQKSYWLGSGRTEAWEWSWPWARTPRLSVMEEDQACAMESRRFEETRGMEEEPTHLPLVVCVDKLTKVYKDDKKLALNKLSLNLYENQVVSFLGHNGAGKTTTMSILTGLFPPTSGSATIYGHDIRTEMDEIRKNLGMCPQHNVLFDRLTVEEHLWFYSRLKSMAQEEIRREMDKMIEDLELSNKRHSLVQTLSGGMKRKLSVAIAFVGGSRAIILDEPTAGVDPYARRAIWDLILKYKPGRTILLSTHHMDEADLLGDRIAIISHGKLKCCGSPLFLKGTYGDGYRLTLVKRPAEPGGPQEPGLASSPPGRAPLSSCSELQVSQFIRKHVASCLLVSDTSTELSYILPSEAAKKGAFERLFQHLERSLDALHLSSFGLMDTTLEEVFLKVSEEDQSLENSEADVKESRKDVLPGAEGPASGEGHAGNLARCSELTQSQASLQSASSVGSARGDEGAGYTDVYGDYRPLFDNPQDPDNVSLQEVEAEALSRVGQGSRKLDGGWLKVRQFHGLLVKRFHCARRNSKALFSQILLPAFFVCVAMTVALSVPEIGDLPPLVLSPSQYHNYTQPRGNFIPYANEERREYRLRLSPDASPQQLVSTFRLPSGVGATCVLKSPANGSLGPTLNLSSGESRLLAARFFDSMCLESFTQGLPLSNFVPPPPSPAPSDSPASPDEDLQAWNVSLPPTAGPEMWTSAPSLPRLVREPVRCTCSAQGTGFSCPSSVGGHPPQMRVVTGDILTDITGHNVSEYLLFTSDRFRLHRYGAITFGNVLKSIPASFGTRAPPMVRKIAVRRAAQVFYNNKGYHSMPTYLNSLNNAILRANLPKSKGNPAAYGITVTNHPMNKTSASLSLDYLLQGTDVVIAIFIIVAMSFVPASFVVFLVAEKSTKAKHLQFVSGCNPIIYWLANYVWDMLNYLVPATCCVIILFVFDLPAYTSPTNFPAVLSLFLLYGWSITPIMYPASFWFEVPSSAYVFLIVINLFIGITATVATFLLQLFEHDKDLKVVNSYLKSCFLIFPNYNLGHGLMEMAYNEYINEYYAKIGQFDKMKSPFEWDIVTRGLVAMAVEGVVGFLLTIMCQYNFLRRPQRMPVSTKPVEDDVDVASERQRVLRGDADNDMVKIENLTKVYKSRKIGRILAVDRLCLGVRPGECFGLLGVNGAGKTSTFKMLTGDESTTGGEAFVNGHSVLKELLQVQQSLGYCPQCDALFDELTAREHLQLYTRLRGISWKDEARVVKWALEKLELTKYADKPAGTYSGGNKRKLSTAIALIGYPAFIFLDEPTTGMDPKARRFLWNLILDLIKTGRSVVLTSHSMEECEALCTRLAIMVNGRLRCLGSIQHLKNRFGDGYMITVRTKSSQSVKDVVRFFNRNFPEAMLKERHHTKVQYQLKSEHISLAQVFSKMEQVSGVLGIEDYSVSQTTLDNVFVNFAKKQSDNLEQQETEPPSALQSPLGCLLSLLRPRSAPTELRALVADEPEDLDTEDEGLISFEEERAQLSFNTDTLC

SEQ ID NO: 69003 - protein, 526 aa, Homo sapiens
LGLALLCSLVLFMYLLECAPQTDGNASLPGVVGENYGKEYYQALLQEQEEHYQTRATSLKRQIAQLKQELQEMSEKMRSLQERRNVGANGIGYQSNKEQAPSDLLEFLHSQIDKAEVSIGAKLPSEYGVIPFESFTLMKVFQLEMGLTRHPEEKPVRKDKRDELVEVIEAGLEVINNPDEDDEQEDEEGPLGEKLIFNENDFVEGYYRTERDKGTQYELFFKKADLTEYRHVTLFRPFGPLMKVKSEMIDITRSIINIIVPLAERTEAFVQFMQNFRDVCIHQDKKIHLTVVYFGKEGLSKVKSILESVTSESNFHNYTLVSLNEEFNRGRGLNVGARAWDKGEVLMFFCDVDIYFSAEFLNSCRLNAEPGKKVFYPVVFSLYNPAIVYANQEVPPPVEQQLVHKKDSGFWRDFGFGMTCQYRSDFLTIGGFDMEVKGWGGEDVHLYRKYLHGDLIVIRTPVPGLFHLWHEKRCADELTPEQYRMCIQSKAMNEASHSHLGMLVFREEIETHLHKQAYRTNSEAVG

SEQ ID NO: 69004 - protein, 483 aa, Homo sapiens
LVLLGVLSVCAASGHGSVAEREAGGEAEWAEPWDGAVFRPPSALGAVGVTRSSGTPRPGREEAGDLPVLLWWSPGLFPHFPGDSERIECARGACVASRNRRALRDSRTRALLFYGTDFRASAAPLPRLAHQSWALLHEESPLNNFLLSHGPGIRLFNLTSTFSRHSDYPLSLQWLPGTAYLRRPVPPPMERAEWRRRGYAPLLYLQSHCDVPADRDRYVRELMRHIPVDSYGKCLQNRELPTARLQDTATATTEDPELLAFLSRYKFHLALENAICNDYMTEKLWRPMHLGAVPVYRGSPSVRDWMPNNHSVILIDDFESPQKLAEFIDFLDKNDEEYMKYLAYKQPGGITNQFLLDSLKHREWGVNDPLLPNYLNGFECFVCDYELARLDAEKAHAASPGDSPVFEPHIAQPSHMDCPVPTPGFGNVEEIPENDSWKEMWLQDYWQGLDQGEALTAMIHNNETEQTKFWDYLHEIFMKRQHL

SEQ ID NO: 69005 - protein, 14 aa, Homo sapiens
MMKCACSSALLFLV

SEQ ID NO: 69006 - protein, 10 aa, Homo sapiens
ITGLWSTFTL

SEQ ID NO: 69007 - protein, 331 aa, Homo sapiens
LKNVFLAYFLVSIAGLLYALVQLGQPCDCLPPLRAAAEQLRQKDLRISQLQAELRRPPPAPAQPPEPEALPTIYVVTPTYARLVQKAELVRLSQTLSLVPRLHWLLVEDAEGPTPLVSGLLAASGLLFTHLVVLTPKAQRLREGEPGWVHPRGVEQRNKALDWLRGRGGAVGGEKDPPPPGTQGVVYFADDDNTYSRELFEEMRWTRGVSVWPVGLVGGLRFEGPQVQDGRVVGFHTAWEPSRPFPVDMAGFAVALPLLLDKPNAQFDSTAPRGHLESSLLSHLVDPKDLEPRAANCTRVLVWHTRTEKPKMKQEEQLQRQGRGSDPAIEV

SEQ ID NO: 69008 - protein, 200 aa, Homo sapiens
VTLAELLVLLAALLATVSGYFVSIDAHAEECFFERVTSGTKMGLIFEVAEGGFLDIDVEITGPDNKGIYKGDRESSGKYTFAAHMDGTYKFCFSNRMSTMTPKIVMFTIDIGEAPKGQDMETEAHQNKLEEMINELAVAMTAVKHEQEYMEVRERIHRAINDNTNSRVVLWSFFEALVLVAMTLGQIYYLKRFFEVRRVV

SEQ ID NO: 69009 - protein, 95 aa, Homo sapiens
KYYALCGFGGVLSCGLTHTAVVPLDLVKCRMQVDPQKYKGIFNGFSVTLKEDGVRGLAKGWAPTFLGYSMQGLCKFGFYEVFKVLYSNMLGEVCN

SEQ ID NO: 69010 - protein, 436 aa, Homo sapiens
LRVVVLCVACGFCSLLYAFSQLAVSLEEGTGGGGGKPQAAVASWLAGGGRGAVRGAGVAGPAAHPGVSDRCKDFSLCYWNPYWMLPSDVCGMNCFWEAAFRYSLKIQPVEKMHLAVVACGERLEETMTMLKSAIIFSIKPLQFHIFAEDQLHHSFKGRLDNWSFLQTFNYTLYPITFPSENAAEWKKLFKPCASQRLFLPLILKEVDSLLYVDTDILFLRPVDDIWSLLKKFNSTQIAAMAPEHEEPRIGWYNRFARHPYYGKTGVNSGVMLMNMTRMRRKYFKNDMTTVRLQWGDILMPLLKKYKLNITWGDQDLLNIVFFHNPESLFVFPCQWNYRPDHCIYGSNCQEAEEGGIFILHGNRGVYHDDKQPAFRAVYEALRNCSFEDDNIRSLLKPLELELQKTVHTYCGKIYKIFIKQLAKSVRDRYARSPKEK

SEQ ID NO: 69011 - protein, 11 aa, Homo sapiens
KVLIAWGVLIT

SEQ ID NO: 69012 - protein, 458 aa, Homo sapiens
LVIVLWGIRLLLQRKKKLVSTSKNGKNQMVIAFFHPYCNAGGGGERVLWCALRALQKKYPEAVYVVYTGDVNVNGQQILEGAFRRFNIRLIHPVQFVFLRKRYLVEDSLYPHFTLLGQSLGSIFLGWEALMQCVPDVYIDSMGYAFTLPLFKYIGGCQVGSYVHYPTISTDMLSVVKNQNIGFNNAAFITRNPFLSKVKLIYYYLFAFIYGLVGSCSDVVMVNSSWTLNHILSLWKVGNCTNIVYPPCDVQTFLDIPLHEKKMTPGHLLVSVGQFRPEKNHPLQIRAFAKLLNKKMVESPPSLKLVLIGGCRNKDDELRVNQLRRLSEDLGVQEYVEFKINIPFDELKNYLSEATIGLHTMWNEHFGIGVVECMAAGTIILAHNSGGPKLDIVVPHEGDITGFLAESEEDYAETIAHILSMSAEKRLQIRKSARASVSRFSDQEFEVTFLSSVEKLFK

SEQ ID NO: 69013 - protein, 1337 aa, Homo sapiens
IFLFFWLFMKETLYDEVLAKQKREQKLIPTKTDKKKAEKKKNKKKEIQNGNLHESDSESVPRDFKLSDALAVEDDQVAPVPLNVVETSSSVRERKKKEKKQKPVLEEQVIKESDASKIPGKKVEPVPVTKQPTPPSEAAASKKKPGQKKSKNGSDDQDKKVETLMVPSKRQEALPLHQETKQESGSGKKKASSKKQKTENVFVDEPLIHATTYIPLMDNADSSPVVDKREVIDLLKPDQVEGIQKSGTKKLKTETDKENAEVKFKDFLLSLKTMMFSEDEALCVVDLLKEKSGVIQDALKKSSKGELTTLIHQLQEKDKLLAAVKEDAAATKDRCKQLTQEMMTEKERSNVVITRMKDRIGTLEKEHNVFQNKIHVSYQETQQMQMKFQQVREQMEAEIAHLKQENGILRDAVSNTTNQLESKQSAELNKLRQDYARLVNELTEKTGKLQQEEVQKKNAEQAATQLKVQLQEAERRWEEVQSYIRKRTAEHEAAQQDLQSKFVAKENEVQSLHSKLTDTLVSKQQLEQRLMQLMESEQKRVNKEESLQMQVQDILEQNEALKAQIQQFHSQIAAQTSASVLAEELHKVIAEKDKQIKQTEDSLASERDRLTSKEEELKDIQNMNFLLKAEVQKLQALANEQAAAAHELEKMQQSVYVKDDKIRLLEEQLQHEISNKMEEFKILNDQNKALKSEVQKLQTLVSEQPNKDVVEQMEKCIQEKDEKLKTVEELLETGLIQVATKEEELNAIRTENSSLTKEVQDLKAKQNDQVSFASLVEELKKVIHEKDGKIKSVEELLEAELLKVANKEKTVQDLKQEIKALKEEIGNVQLEKAQQLSITSKVQELQNLLKGKEEQMNTMKAVLEEKEKDLANTGKWLQDLQEENESLKAHVQEVAQHNLKEASSASQFEELEIVLKEKENELKRLEAMLKERESDLSSKTQLLQDVQDENKLFKSQIEQLKQQNYQQASSFPPHEELLKVISEREKEISGLWNELDSLKDAVEHQRKKNNDLREKNWEAMEALASTEKMLQDKVNKTSKERQQQVEAVELEAKEVLKKLFPKVSVPSNLSYGEWLHGFEKKAKECMAGTSGSEEVKVLEHKLKEADEMHTLLQLECEKYKSVLAETEGILQKLQRSVEQEENKWKVKVDESHKTIKQMQSSFTSSEQELERLRSENKDIENLRREREHLEMELEKAEMERSTYVTEVRELKDLLTELQKKLDDSYSEAVRQNEELNLLKAQLNETLTKLRTEQNERQKVAGDLHKAQQSLELIQSKIVKAAGDTTVIENSDVSPETESSEKETMSVSLNQTVTQLQQLLQAVNQQLTKEKEHYQVLE

SEQ ID NO: 69014 - protein, 562 aa, Homo sapiens
ILFAWGTLLFYIGGHLVRDNDHPDHSSRELSKILAKLERLKQQNEDLRRMAESLRIPEGPIDQGPAIGRVRVLEEQLVKAKEQIENYKKQTRNGLGKDHEILRRRIENGAKELWFFLQSELKKLKNLEGNELQRHADEFLLDLGHHERSIMTDLYYLSQTDGAGDWREKEAKDLTELVQRRITYLQNPKDCSKAKKLVCNINKGCGYGCQLHHVVYCFMIAYGTQRTLILESQNWRYATGGWETVFRPVSETCTDRSGISTGHWSGEVKDKNVQVVELPIVDSLHPRPPYLPLAVPEDLADRLVRVHGDPAVWWVSQFVKYLIRPQPWLEKEIEEATKKLGFKHPVIGVHVRRTDKVGTEAAFHPIEEYMVHVEEHFQLLARRMQVDKKRVYLATDDPSLLKEAKTKYPNYEFISDNSISWSAGLHNRYTENSLRGVILDIHFLSQADFLVCTFSSQVCRVAYEIMQTLHPDASANFHSLDDIYYFGGQNAHNQIAIYAHQPRTADEIPMEPGDIIGVAGNHWDGYSKGVNRKLGRTGLYPSYKVREKIETVKYPTYPEAEK

SEQ ID NO: 69015 - protein, 8 aa, Homo sapiens
IFGWYLCL

SEQ ID NO: 69016 - protein, 2787 aa, Homo sapiens
VFYLVFLGSTLRHCTSTRKVSSDTLETIAPGHDCCETVKVQLCASKEGLPVFVVAEEDFHFVQDEAYDAAQFLATSAGNQQALNFTRFLDQSGPPSGDVNSLDKKLVLAFRHLKLPTEWNVLGTDQSLHDAGPRETLMHFAVRLGLLRLTWFLLQKPGGRGALSIHNQEGATPVSLALERGYHKLHQLLTEENAGEPDSWSSLSYEIPYGDCSVRHHRELDIYTLTSESDSHHEHPFPGDGCTGPIFKLMNIQQQLMKTNLKQMDSLMPLMMTAQDPSSAPETDGQFLPCAPEPTDPQRLSSSEETESTQCCPGSPVAQTESPCDLSSIVEEENTDRSCRKKNKGVERKGEEVEPAPIVDSGTVSDQDSCLQSLPDCGVKGTEGLSSCGNRNEETGTKSSGMPTDQESLSSGDAVLQRDLVMEPGTAQYSSGGELGGISTTNVSTPDTAGEMEHGLMNPDATVWKNVLQGGESTKERFENSNIGTAGASDVHVTSKPVDKISVPNCAPAASSLDGNKPAESSLAFSNEETSTEKTAETETSRSREESADAPVDQNSVVIPAAAKDKISDGLEPYTLLAAGIGEAMSPSDLALLGLEEDVMPHQNSETNSSHAQSQKGKSSPICSTTGDDKLCADSACQQNTVTSSGDLVAKLCDNIVSESESTTARQPSSQDPPDASHCEDPQAHTVTSDPVRDTQERADFCPFKVVDNKGQRKDVKLDKPLTNMLEVVSHPHPVVPKMEKELVPDQAVISDSTFSLANSPGSESVTKDDALSFVPSQKEKGTATPELHTATDYRDGPDGNSNEPDTRPLEDRAVGLSTSSTAAELQHGMGNTSLTGLGGEHEGPAPPAIPEALNIKGNTDSSLQSVGKATLALDSVLTEEGKLLVVSESSAAQEQDKDKAVTCSSIKENALSSGTLQEEQRTPPPGQDTQQFHEKSISADCAKDKALQLSNSPGASSAFLKAETEHNKEVAPQVSLLTQGGAAQSLVPPGASLATESRQEALGAEHNSSALLPCLLPDGSDGSDALNCSQPSPLDVGVKNTQSQGKTSACEVSGDVTVDVTGVNALQGMAEPRRENISHNTQDILIPNVLLSQEKNAVLGLPVALQDKAVTDPQGVGTPEMIPLDWEKGKLEGADHSCTMGDAEEAQIDDEAHPVLLQPVAKELPTDMELSAHDDGAPAGVREVMRAPPSGRERSTPSLPCMVSAQDAPLPKGADLIEEAASRIVDAVIEQVKAAGALLTEGEACHMSLSSPELGPLTKGLESAFTEKVSTFPPGESLPMGSTPEEATGSLAGCFAGREEPEKIILPVQGPEPAAEMPDVKAEDEVDFRASSISEEVAVGSIAATLKMKQGPMTQAINRENWCTIEPCPDAASLLASKQSPECENFLDVGLGRECTSKQGVLKRESGSDSDLFHSPSDDMDSIIFPKPEEEHLACDITGSSSSTDDTASLDRHSSHGSDVSLSQILKPNRSRDRQSLDGFYSHGMGAEGRESESEPADPGDVEEEEMDSITEVPANCSVLRSSMRSLSPFRRHSWGPGKNAASDAEMNHRSMSWCPSGVQYSAGLSADFNYRSFSLEGLTGGAGVGNKPSSSLEVSSANAEELRHPFSGEERVDSLVSLSEEDLESDQREHRMFDQQICHRSKQQGFNYCTSAISSPLTKSISLMTISHPGLDNSRPFHSTFHNTSANLTESITEENYNFLPHSPSKKDSEWKSGTKVSRTFSYIKNKMSSSKKSKEKEKEKDKIKEKEKDSKDKEKDKKTVNGHTFSSIPVVGPISCSQCMKPFTNKDAYTCANCSAFVHKGCRESLASCAKVKMKQPKGSLQAHDTSSLPTVIMRNKPSQPKERPRSAVLLVDETATTPIFANRRSQQSVSLSKSVSIQNITGVGNDENMSNTWKFLSHSTDSLNKISKVNESTESLTDEGVGTDMNEGQLLGDFEIESKQLEAESWSRIIDSKFLKQQKKDVVKRQEVIYELMQTEFHHVRTLKIMSGVYSQGMMADLLFEQQMVEKLFPCLDELISIHSQFFQRILERKKESLVDKSEKNFLIKRIGDVLVNQFSGENAERLKKTYGKFCGQHNQSVNYFKDLYAKDKRFQAFVKKKMSSSVVRRLGIPECILLVTQRITKYPVLFQRILQCTKDNEVEQEDLAQSLSLVKDVIGAVDSKVASYEKKVRLNEIYTKTDSKSIMRMKSGQMFAKEDLKRKKLVRDGSVFLKNAAGRLKEVQAVLLTDILVFLQEKDQKYIFASLDQKSTVISLKKLIVREVAHEEKGLFLISMGMTDPEMVEVHASSKEERNSWIQIIQDTINTLNRDEDEGIPSENEEEKKMLDTRARELKEQLHQKDQKILLLLEEKEMIFRDMAECSTPLPEDCSPTHSPRVLFRSNTEEALKGGPLMKSAINEVEILQGLVSGNLGGTLGPTVSSPIEQDVVGPVSLPRRAETFGGFDSHQMNASKGGEKEEGDDGQDLRRTESDSGLKKGGNANLVFMLKRNSEQVVQSVVHLYELLSALQGVVLQQDSYIEDQKLVLSERALTRSLSRPSSLIEQEKQRSLEKQRQDLANLQKQQAQYLEEKRRREREWEARERELREREALLAQREEEVQQGQQDLEKEREELQQKKGTYQYDLERLRAAQKQLEREQEQLRREAERLSQRQTERDLCQVSHPHTKLMRIPSFFPSPEEPPSPSAPSIAKSGSLDSELSVSPKRNSISRTHKDKGPFHILSSTSQTNKGPEGQSQAPASTSASTRLFGLTKPKEKKEKKKKNKTSRSQPGDGPASEVSAEGEEIFC

SEQ ID NO: 69017 - protein, 38 aa, Homo sapiens
LVPCVLGLLLLPILAMLMALCVHCHRLPGSYDSTSSDR

SEQ ID NO: 69018 - protein, 382 aa, Homo sapiens
VIILGGGGLLFASYLMATGDERFYAEHLMPTLQGLLDPESAHRLAVRFTSLGLLPRARFQDSDMLEVRVLGHKFRNPVGIAAGFDKHGEAVDGLYKMGFGFVEIGSVTPKPQEGNPRPRVFRLPEDQAVINRYGFNSHGLSVVEHRLRARQQKQAKLTEDGLPLGVNLGKNKTSVDAAEDYAEGVRVLGPLADYLVVNVSSPNTAGLRSLQGKAELRRLLTKVLQERDGLRRVHRPAVLVKIAPDLTSQDKEDIASVVKELGIDGLIVTNTTVSRPAGLQGALRSETGGLSGKPLRDLSTQTIREMYALTQGRVPIIGVGGVSSGQDALEKIRAGASLVQLYTALTFWGPPVVGKVKRELEALLKEQGFGGVTDAIGADHRR

SEQ ID NO: 69019 - protein, 560 aa, Homo sapiens
LRLRLLALLLLLLAPPARAPKPSAQDVSLGVDWLTRYGYLPPPHPAQAQLQSPEKLRDAIKVMQRFAGLPETGRMDPGTVATMRKPRCSLPDVLGVAGLVRRRRRYALSGSVWKKRTLTWRVRSFPQSSQLSQETVRVLMSYALMAWGMESGLTFHEVDSPQGQEPDILIDFARAFHQDSYPFDGLGGTLAHAFFPGEHPISGDTHFDDEETWTFGSKDGEGTDLFAVAVHEFGHALGLGHSSAPNSIMRPFYQGPVGDPDKYRLSQDDRDGLQQLYGKAPQTPYDKPTRKPLAPPPQPPASPTHSPSFPIPDRCEGNFDAIANIRGETFFFKGPWFWRLQPSGQLVSPRPARLHRFWEGLPAQVRVVQAAYARHRDGRILLFSGPQFWVFQDRQLEGGARPLTELGLPPGEEVDAVFSWPQNGKTYLVRGRQYWRYDEAAARPDPGYPRDLSLWEGAPPSPDDVTVSNAGDTYFFKGAHYWRFPKNSIKTEPDAPQPMGPNWLDCPAPSSGPRAPRPPKATPVSETCDCQCELNQAAGRWPAPIPLLLLPLLVGGVASR

SEQ ID NO: 69020 - protein, 528 aa, Homo sapiens
LWPLLLLLLLLPTLALLRQQRSQDARLSWLAGLQHRVAWGALVWAATWQRRRLEQSTLHVHQSQQQALRWCLQGAQRPHCSLRRSTDISTFRNHLPLTKASQTQQEDSGEQPLPPTSNQDLGEASLQATLLGLAALNKAYPEVLAQGRTARVTLTSPWPRPLPWPGNTLGQVGTPGTKDPRALLLDALRSPGLRALEAGTAVELLDVFLGLETDGEELAGAIAAGNPGAPLRERAAELREALEQGPRGLALRLWPKLQVVVTLDAGGQAEAVAALGALWCQGLAFFSPAYAASGGVLGLNLQPEQPHGLYLLPPGAPFIELLPVKEGTQEEAASTLLLAEAQQGKEYELVLTDRASLTRCRLGDVVRVVGAYNQCPVVRFICRLDQTLSVRGEDIGEDLFSEALGRAVGQWAGAKLLDHGCVESSILDSSAGSAPHYEVFVALRGLRNLSEENRDKLDHCLQEASPRYKSLRFWGSVGPARVHLVGQGAFRALRAALAACPSSPFPPAMPRVLRHRHLAQCLQERVVS

SEQ ID NO: 69021 - protein, 64 aa, Homo sapiens
TLLIILFIIVPIFLLLDKDDSKAGMEEDHTYEGLDIDQTATYEDIVTLRTGEVKWSVGEHPGQE

SEQ ID NO: 69022 - protein, 32 aa, Homo sapiens
ILLYFWLFFMYTELYVKRCFGIHQFPLPRTCL

SEQ ID NO: 69023 - protein, 163 aa, Homo sapiens
KALHGHPQLPRTVPTRAAMRAAGTLLAFCCLVLSTTGGPSPDTCSQDLNSRVKPGFPKTIKTNDPGVLQAARYSVEKFNNCTNDMFLFKESRITRALVQIVKGLKYMLEVEIGRTTCKKNQHLRLDDCDFQTNHTLKQTLSCYSEVWVVPWLQHFEVPVLRCH

SEQ ID NO: 69024 - protein, 115 aa, Homo sapiens
LLVLLLLGPGGWCLAEPPRDSLREELVITPLPSGDVAATFQFRTRWDSELQREGVSHYRLFPKALGQLISKYSLRELHLSFTQGFWRTRYWGPPFLQAPSGAELWVWFQDTVTEH

SEQ ID NO: 69025 - protein, 14 aa, Homo sapiens
VVLSISLCTICFRL

SEQ ID NO: 69026 - protein, 69 aa, Homo sapiens
IVIGYVLLFGINMMSTSPLDSIHTITDNYAKNQQQKKYQEEAIPALRDISISEVNQMFFLAAKELYTKN

SEQ ID NO: 69027 - protein, 43 aa, Homo sapiens
RSTAEDSSTPRDMLGLRPPLLALVGLLSLGCGEFCVPRRGLHA

SEQ ID NO: 69028 - protein, 378 aa, Homo sapiens
MGQVTALLTSIGWTLPVLPELDDLTVGGLIMGTGIESSSHKYGLFQHICTAYELVLADGSFVRCTPSENSDLFYAVPWSCGTLGFLVAAEIRIIPAKKYVKLRFEPVRGLEAICAKFTHESQRQENHFVEGLLYSLDEAVIMTGVMTDEAEPSKLNSIGNYYKPWFFKHVENYLKTNREGLEYIPLRHYYHRHTRSIFWELQDIIPFGNNPIFRYLFGWMVPPKISLLKLTQGETLRKLYEQHHVVQDMLVPMKCLQQALHTFQNDIHVYPIWLCPFILPSQPGLVHPKGNEAELYIDIGAYGEPRVKHFEARSCMRQLEKFVRSVHGFQMLYADCYMNREEFWEMFDGSLYHKLREKLGCQDAFPEVYDKICKAARH

SEQ ID NO: 69029 - protein, 140 aa, Homo sapiens
MVESFKFISGILAALSAMISLEIPQVNIMTKMDLLSKKAKKEIEKFLDPDMYSLLEDSTSDLRSKKFKKLTKAICGLIDDYSMVRFLPYDQSDEESMNIVLQHIDFAIQYGEDLEFKEPKEREDESSSMFDEYFQECQDE

SEQ ID NO: 69030 - protein, 189 aa, Homo sapiens
MLLLLFATQITLGILISTQRAQLERSLRDVVEKTIQKYGTNPEETAAEESWDYVQFQLRCCGWHYPQDWFQVLILRGNGSEAHRVPCSCYNLSATNDSTILDKVILPQLSRLGHLARSRHSADICAVPAESHIYREGCAQGLQKWLHNNLISIVGICLGVGLLELGFMTLSIFLCRNLDHVYNRLARYR

SEQ ID NO: 69031 - protein, 63 aa, Homo sapiens
IVFSLTFFKRRMWPLAFGSGMGLGMAYSNCQHDFQAPYLLHGKYVKVCTEYIFLFPSEEKDFS

SEQ ID NO: 69032 - protein, 33 aa, Homo sapiens
RIVVTLLATFSFIITLVVKSSFPEKGHKRPGQV

SEQ ID NO: 69033 - protein, 13 aa, Homo sapiens
LVIPPWLFLAYIN

SEQ ID NO: 69034 - protein, 29 aa, Homo sapiens
VALSFSGAIGLTFLMLGCALEDYGCTSLK

SEQ ID NO: 69035 - protein, 10 aa, Homo sapiens
ILLMYYFTLQ

SEQ ID NO: 69036 - protein, 32 aa, Homo sapiens
IYLALPLYHMSGSLLGIVGCMGIGQSPQPHLH

SEQ ID NO: 69037 - protein, 29 aa, Homo sapiens
ITFGLIFYFSTDNLVRPFMDTLASHQLYI

SEQ ID NO: 69038 - protein, 246 aa, Homo sapiens
LMAFLLPLIIVLMVKHSDSRTHSLRYFRLGVSDPIHGVPEFISVGYVDSHPITTYDSVTRQKEPRAPWMAENLAPDHWERYTQLLRGWQQMFKVELKRLQRHYNHSGSHTYQRMIGCELLEDGSTTGFLQYAYDGQDFLIFNKDTLSWLAVDNVAHTIKQAWEANQHELLYQKNWLEEECIAWLKRFLEYGKDTLQRTESETIPLVMKAVSGSIVLVIVLAGVGVLVWRRRPREQNGAIYLPTPDR

SEQ ID NO: 69039 - protein, 306 aa, Homo sapiens
LPLLGELPRLLLLVLLCLPAVWGDCGLPPDVPNAQPALEGRTSFPEDTVITYKCEESFVKIPGEKDSVICLKGSQWSDIEEFCNQKSCPNPGEIRNGQIDVPGGILFGATISFSCNTGYKLFGSTSSFCLISGSSVQWSDPLPECREIYCPAPPQIDNGIIQGERDHYGYRQSVTYACNKGFTMIGEHSIYCTVNNDEGEWSGPPPECRGKSLTSKVPPTVQKPTTVNVPTTEVSPTSQKTTTKTTTPNAQATRSTPVSRTTKHFHETTPNKGSGTTSGTTRLLSGHTCFTLTGLLGTLVTMGLLT

SEQ ID NO: 69040 - protein, 25 aa, Homo sapiens
LGNCSLTWAALIILLLPGRPSHPHQ

SEQ ID NO: 69041 - protein, 20 aa, Homo sapiens
IFIFYFFLTKTRFMSLDFEG

SEQ ID NO: 69042 - protein, 20 aa, Homo sapiens
IATLLYVVHAVFSLIRWKSS

SEQ ID NO: 69043 - protein, 11 aa, Homo sapiens
ILVFMMMILKS

SEQ ID NO: 69044 - protein, 327 aa, Homo sapiens
RAAPSVLASLTHPHRPLFLLPLGAAAAMILLEVNNRIIEETLALKFENAAAGNKPEAVEVTFADFDGVLYHISNPNGDKTKVMVSISLKFYKELQAHGADELLKRVYGSFLVNPESGYNVSLLYDLENLPASKDSIVHQAGMLKRNCFASVFEKYFQFQEEGKEGENRAVIHYRDDETMYVESKKDRVTVVFSTVFKDDDDVVIGKVFMQEFKEGRRASHTAPQVLFSHREPPLELKDTDAAVGDNIGYITFVLFPRHTNASARDNTINLIHTFRDYLHYHIKCSKAYIHTRMRAKTSDFLKVLNRARPDAEKKEMKTITGKTFSSR

SEQ ID NO: 69045 - protein, 104 aa, Homo sapiens
LYQYFLSYLQSLLLFPPQQLKPPPELCPEDINTFKLLSYASYCIEHGDLELAAKFVNQLKGESRRVAQDWLKEARMTLETKQIVEILTAYASAVGIGTTQVQPE

SEQ ID NO: 69046 - protein, 14 aa, Homo sapiens
LIIIYALMFLLNVM

SEQ ID NO: 69047 - protein, 169 aa, Homo sapiens
LPALLLPLLGLAAAAVADCPSSTWIQFQDSCYIFLQEAIKVESIEDVRNQCTDHGADMISIHNEEENAFILDTLKKQWKGPDDILLGMFYDTDVPYKRKYLSDNHILISALVIASTVILTVLGAIIWFLYKKHSDSRFTTVFSTAPQSPYNEDCVLVVGEENEYPVQFD

SEQ ID NO: 69048 - protein, 15 aa, Homo sapiens
ILLFILCLMHSYFTP

SEQ ID NO: 69049 - protein, 34 aa, Homo sapiens
LIKTFPLKLASGLISLFQESLWLVGFQYAPVPDC

SEQ ID NO: 69050 - protein, 49 aa, Homo sapiens
VSAFFSLAALAEVAAMENVHRGQRSTPLTHDGQPKEMPQAPVLISCADQ

SEQ ID NO: 69051 - protein, 10 aa, Homo sapiens
IGYLVYTLCI

SEQ ID NO: 69052 - protein, 414 aa, Homo sapiens
KLAALGSLLVLMVLHSPSLLASWQRNELTDRRFLQLNKCPACFGTSWCRRFLNGQVVFEAWGRLRLLDFLNVKNVYFAQYGEPREGGRRRVVLKRLGSQRELAQLDQSICKRATGRPRCDLLQAMPRTEFARLNGDVRLLTPEAVEGWSDLVHCPSQRLLDRLVRRYAETKDSGSFLLRNLKDSERMQLLLTLAFNPEPLVLQSFPSDEGWPFAKYLGACGRMVAVNYVGEELWSYFNAPWEKRVDLAWQLMEIAEQLTNNDFEFALYLLDVSFDNFAVGPRDGKVIIVDAENVLVADKRLIRQNKPENWDVWYESKFDDCDKEACLSFSKEILCARATVDHNYYAVCQNLLSRHATWRGTSGGLLHDPPSEIAKDGRLEALLDECANPKKRYGRFQAAKELREYLAQLSNNVR

SEQ ID NO: 69053 - protein, 63 aa, Homo sapiens
IGRISSIREFGFFMVLICLGSGIMRDIAHLEITALCPLRDVPSHSNHGDPLSYYQTGDIIRGD

SEQ ID NO: 69054 - protein, 14 aa, Homo sapiens
ILLSICILLFVSGS

SEQ ID NO: 69055 - protein, 26 aa, Homo sapiens
VDFALLLSWSSVLELVLSLSLCTFPV

SEQ ID NO: 69056 - protein, 25 aa, Homo sapiens
VTIIGGIVFLAFAFSALFISPDSGF

SEQ ID NO: 69057 - protein, 15 aa, Homo sapiens
ILTRLLLWPSMFCFL

SEQ ID NO: 69058 - protein, 25 aa, Homo sapiens
ILRVGFAAFSVLWACCSRICGAKQP

SEQ ID NO: 69059 - protein, 167 aa, Homo sapiens
IQAPTMKGFTATLFLWTLIFPSCSGGGGGKAWPTHVVCSDSGLEVLYQSCDPLQDFGFSVEKCSKQLKSNINIRFGIILREDIKELFLDLALMSQGSSVLNFSYPICEAALPKFSFCGRRKGEQIYYAGPVNNPEFTIPQGEYQVLLELYTEKRSTVACANATIMCS

SEQ ID NO: 69060 - protein, 346 aa, Homo sapiens
LAFLLLNFRVCLLLLQLLMPHSAQFSVLGPSGPILAMVGEDADLPCHLFPTMSAETMELKWVSSSLRQVVNVYADGKEVEDRQSAPYRGRTSILRDGITAGKAALRIHNVTASDSGKYLCYFQDGDFYEKALVELKVAALGSDLHVDVKGYKDGGIHLECRSTGWYPQPQIQWSNNKGENIPTVEAPVVADGVGLYAVAASVIMRGSSGEGVSCTIRSSLLGLEKTASISIADPFFRSAQRWIAALAGTLPVLLLLLGGAGYFLWQQQEEKKTQFRKKKREQELREMAWSTMKQEQSTRVKLLEELRWRSIQYASRGERHSAYNEWKKALFKPGEEMLQMRLHFVK

SEQ ID NO: 69061 - protein, 578 aa, Homo sapiens
LAFLLLNFHVSLFLVQLLTPCSAQFSVLGPSGPILAMVGEDADLPCHLFPTMSAETMELRWVSSSLRQVVNVYADGKEVEDRQSAPYRGRTSILRDGITAGKAALRIHNVTASDSGKYLCYFQDGDFYEKALVELKVAALGSDLHIEVKGYEDGGIHLECRSTGWYPQPQIKWSDTKGENIPAVEAPVVADGVGLYAVAASVIMRGSSGGGVSCIIRNSLLGLEKTASISIADPFFRSAQPWIAALAGTLPISLLLLAGASYFLWRQQKEKIALSRETEREREMKEMGYAATEQEISLREKLQEELKWRKIQYMARGEKSLAYHEWKMALFKPADVILDPDTANAILLVSEDQRSVQRAEEPRDLPDNPERFEWRYCVLGCENFTSGRHYWEVEVGDRKEWHIGVCSKNVERKKGWVKMTPENGYWTMGLTDGNKYRALTEPRTNLKLPEPPRKVGIFLDYETGEISFYNATDGSHIYTFPHASFSEPLYPVFRILTLEPTALTICPIPKEVESSPDPDLVPDHSLETPLTPGLANESGEPQAEVTSLLLPAHPGAEVSPSATTNQNHKLQARTEALY

SEQ ID NO: 69062 - protein, 28 aa, Homo sapiens
IVILTLALAALIFRRIYLANEYIFDFEL

SEQ ID NO: 69063 - protein, 58 aa, Homo sapiens
ISIKVHNIVLMMQVTVTTTYFGHSEQISQERYQYVDCGRNTTYQLGQSEYLNVLQPQQ

SEQ ID NO: 69064 - protein, 13 aa, Homo sapiens
VWDFWVFSWLASC

SEQ ID NO: 69065 - protein, 19 aa, Homo sapiens
IMTALQIASFILLRLFAED

SEQ ID NO: 69066 - protein, 20 aa, Homo sapiens
LTGFTIMVVLTMYSGQIQIG

SEQ ID NO: 69067 - protein, 119 aa, Homo sapiens
KDMRVPSALVTLHMLLCSIPLSGRLDSDEQKIQNDIIDILLTFTQGVNEKLTISEETLANNTWSLMLKEVLSSILKVPEGFFSGLILLSELLPLPLPMQTTQVSLPYNMHLINDCSNTF

SEQ ID NO: 69068 - protein, 19 aa, Homo sapiens
LGGWTVLLLLSLYEDDITF

SEQ ID NO: 69069 - protein, 23 aa, Homo sapiens
KPFLLGTVFFTCFPIPLMRISPW

SEQ ID NO: 69070 - protein, 38 aa, Homo sapiens
VGSCFALSSFLSFLAIIPISIVAYKQVPLSPYGDIIEK

SEQ ID NO: 69071 - protein, 25 aa, Homo sapiens
LLLFVAVLLYSLPNYLSMKIVKPNV

SEQ ID NO: 69072 - protein, 11 aa, Homo sapiens
LHMSAWLFLLF

SEQ ID NO: 69073 - protein, 55 aa, Homo sapiens
VFGFEYAILMTMVLTIFIKYVLHSVDLQSENPWDNKAVYMLYTELFTGERGLGLS

SEQ ID NO: 69074 - protein, 46 aa, Homo sapiens
LGPCHNLQAALGPRWALVWLWPFLASPLPGDGITFQTTADVGHTAS

SEQ ID NO: 69075 - protein, 1098 aa, Homo sapiens
LSPFTITVVLLLSACFVTSSLGGTDKELRLVDGENKCSGRVEVKVQEEWGTVCNNGWSMEAVSVICNQLGCPTAIKAPGWANSSAGSGRIWMDHVSCRGNESALWDCKHDGWGKHSNCTHQQDAGVTCSDGSNLEMRLTRGGNMCSGRIEIKFQGRWGTVCDDNFNIDHASVICRQLECGSAVSFSGSSNFGEGSGPIWFDDLICNGNESALWNCKHQGWGKHNCDHAEDAGVICSKGADLSLRLVDGVTECSGRLEVRFQGEWGTICDDGWDSYDAAVACKQLGCPTAVTAIGRVNASKGFGHIWLDSVSCQGHEPAIWQCKHHEWGKHYCNHNEDAGVTCSDGSDLELRLRGGGSRCAGTVEVEIQRLLGKVCDRGWGLKEADVVCRQLGCGSALKTSYQVYSKIQATNTWLFLSSCNGNETSLWDCKNWQWGGLTCDHYEEAKITCSAHREPRLVGGDIPCSGRVEVKHGDTWGSICDSDFSLEAASVLCRELQCGTVVSILGGAHFGEGNGQIWAEEFQCEGHESHLSLCPVAPRPEGTCSHSRDVGVVCSRYTEIRLVNGKTPCEGRVELKTLGAWGSLCNSHWDIEDAHVLCQQLKCGVALSTPGGARFGKGNGQIWRHMFHCTGTEQHMGDCPVTALGASLCPSEQVASVICSGNQSQTLSSCNSSSLGPTRPTIPEESAVACIESGQLRLVNGGGRCAGRVEIYHEGSWGTICDDSWDLSDAHVVCRQLGCGEAINATGSAHFGEGTGPIWLDEMKCNGKESRIWQCHSHGWGQQNCRHKEDAGVICSEFMSLRLTSEASREACAGRLEVFYNGAWGTVGKSSMSETTVGVVCRQLGCADKGKINPASLDKAMSIPMWVDNVQCPKGPDTLWQCPSSPWEKRLASPSEETWITCDNKIRLQEGPTSCSGRVEIWHGGSWGTVCDDSWDLDDAQVVCQQLGCGPALKAFKEAEFGQGTGPIWLNEVKCKGNESSLWDCPARRWGHSECGHKEDAAVNCTDISVQKTPQKATTGRSSRQSSFIAVGILGVVLLAIFVALFFLTKKRRQRQRLAVSSRGENLVHQIQYREMNSCLNADDLDLMNSSGGHSEPH

SEQ ID NO: 69076 - protein, 37 aa, Homo sapiens
VLMGTWAFLAAGGSCRSLKLCLLCQDKNFLLYNQRSR

SEQ ID NO: 69077 - protein, 71 aa, Homo sapiens
IVFSCILLYVVFQKLSARLRALRQRQLDRAAAAVEPDVVVKRQEALAAARLKMQEELNAQVEKHKEKLKQV

SEQ ID NO: 69078 - protein, 127 aa, Homo sapiens
LVLPLLCLGAGFLFLNTLFIQRGRHETTWTILRRFGYSDALELTADYLSPLIHVPPGCSTELNHLGYQFVQRVFEKHDQDRDGALSPVELQSLFSVFPAAPWGPELPRTVRTEAGRLPLHGYLCQWT

SEQ ID NO: 69079 - protein, 228 aa, Homo sapiens
LVPCVLGLLLLPILAMLMALCVHCHRLPGSYDSTSSDSLYPRGIQFKRPHTVAPWPPAYPPVTSYPPLSQPDLLPIPRSPQPLGGSHRTPSSRRDSDGANSVASYENEEPACEDADEDEDDYHNPGYLVVLPDSTPATSTAAPSAPALSTPGIRDSAFSMESIDDYVNVPESGESAEASLDGSREYVNVSQELHPGAAKTEPAALSSQEAEEVEEEGAPDYENLQELN

SEQ ID NO: 69080 - protein, 1170 aa, Homo sapiens
VPATPGSPPSRFWLLPAMALRVLLLTALTLCHGFNLDTENAMTFQENARGFGQSVVQLQGSRVVVGAPQEIVAANQRGSLYQCDYSTGSCEPIRLQVPVEAVNMSLGLSLAATTSPPQLLACGPTVHQTCSENTYVKGLCFLFGSNLRQQPQKFPEALRGCPQEDSDIAFLIDGSGSIIPHDFRRMKEFVSTVMEQLKKSKTLFSLMQYSEEFRIHFTFKEFQNNPNPRSLVKPITQLLGRTHTATGIRKVVRELFNITNGARKNAFKILVVITDGEKFGDPLGYEDVIPEADREGVIRYVIGVGDAFRSEKSRQELNTIASKPPRDHVFQVNNFEALKTIQNQLREKIFAIEGTQTGSSSSFEHEMSQEGFSAAITSNGPLLSTVGSYDWAGGVFLYTSKEKSTFINMTRVDSDMNDAYLGYAAAIILRNRVQSLVLGAPRYQHIGLVAMFRQNTGMWESNANVKGTQIGAYFGASLCSVDVDSNGSTDLVLIGAPHYYEQTRGGQVSVCPLPRGQRARWQCDAVLYGEQGQPWGRFGAALTVLGDVNGDKLTDVAIGAPGEEDNRGAVYLFHGTSGSGISPSHSQRIAGSKLSPRLQYFGQSLSGGQDLTMDGLVDLTVGAQGHVLLLRSQPVLRVKAIMEFNPREVARNVFECNDQVVKGKEAGEVRVCLHVQKSTRDRLREGQIQSVVTYDLALDSGRPHSRAVFNETKNSTRRQTQVLGLTQTCETLKLQLPNCIEDPVSPIVLRLNFSLVGTPLSAFGNLRPVLAEDAQRLFTALFPFEKNCGNDNICQDDLSITFSFMSLDCLVVGGPREFNVTVTVRNDGEDSYRTQVTFFFPLDLSYRKVSTLQNQRSQRSWRLACESASSTEVSGALKSTSCSINHPIFPENSEVTFNITFDVDSKASLGNKLLLKANVTSENNMPRTNKTEFQLELPVKYAVYMVVTSHGVSTKYLNFTASENTSRVMQHQYQVSNLGQRSLPISLVFLVPVRLNQTVIWDRPQVTFSENLSSTCHTKERLPSHSDFLAELRKAPVVNCSIAVCQRIQCDIPFFGIQEEFNATLKGNLSFDWYIKTSHNHLLIVSTAEILFNDSVFTLLPGQGAFVRSQTETKVEPFEVPNPLPLIVGSSVGGLLLLALITAALYKLGFFKRQYKDMMSEGGPPGAEPQ

SEQ ID NO: 69081 - protein, 682 aa, Homo sapiens
LLQTTLFLLSLLFLVQGAHGRGHREDFRFCSQRNQTHRSSLHYKPTPDLRISIENSEEALTVHAPFPAAHPASRSFPDPRGLYHFCLYWNRHAGRLHLLYGKRDFLLSDKASSLLCFQHQEESLAQGPPLLATSVTSWWSPQNISLPSAASFTFSFHSPPHTAAHNASVDMCELKRDLQLLSQFLKHPQKASRRPSAAPASQQLQSLESKLTSVRFMGDMVSFEEDRINATVWKLQPTAGLQDLHIHSRQEEEQSEIMEYSVLLPRTLFQRTKGRSGEAEKRLLLVDFSSQALFQDKNSSQVLGEKVLGIVVQNTKVANLTEPVVLTFQHQLQPKNVTLQCVFWVEDPTLSSPGHWSSAGCETVRRETQTSCFCNHLTYFAVLMVSSVEVDAVHKHYLSLLSYVGCVVSALACLVTIAAYLCSRRKPRDYTIKVHMNLLLAVFLLDTSFLLSEPVALTGSEAGCRASAIFLHFSLLTCLSWMGLEGYNLYRLVVEVFGTYVPGYLLKLSAMGWGFPIFLVTLVALVDVDNYGPIILAVHRTPEGVIYPSMCWIRDSLVSYITNLGLFSLVFLFNMAMLATMVVQILRLRPHTQKWSHVLTLLGLSLVLGLPWALIFFSFASGTFQLVVLYLFSIITSFQGFLIFIWYWSMRLQARGGPSPLKSNSDSARLPISSGSTSSSRI

SEQ ID NO: 69082 - protein, 28 aa, Homo sapiens
VLLADILPTLVIKLLAPLGLHLLPYRSG

SEQ ID NO: 69083 - protein, 25 aa, Homo sapiens
ISDTLGISLSGLLALPLHDFLCQLS

SEQ ID NO: 69084 - protein, 52 aa, Homo sapiens
RMYLAMVLLGATHGLIFLPVLLSYIGPSVNKAKSCATEERYKGTERERLLNF

SEQ ID NO: 69085 - protein, 41 aa, Homo sapiens
VAFRNPLKVLLLLTDLSLLWKFHPKDFSGKDNEEVKQLVSY

SEQ ID NO: 69086 - protein, 159 aa, Homo sapiens
LWAALLLGAVALRPAEAVSEPTTVAFDVRPGGVVHSFSHNVGPGDKYTCMFTYASQGGTNEQWQMSLGTSEDHQHFTCTIWRPQGKSYLYFTQFKAEVRGAEIEYAMAYSKAAFERESDVPLKTEEFEVTKTAVAHRPGAFKAELSKLVIVAKASRTEL

SEQ ID NO: 69087 - protein, 129 aa, Homo sapiens
MGGRVFLVFLAFCVWLTLPGAETQDSRGCARWCPQDSSCVNATACRCNPGFSSFSEIITTPMETCDDINECATLSKVSCGKFSDCWNTEGSYDCVCSPGYEPVSGAKTFKNESENTCQAHHGPRHPVQK

SEQ ID NO: 69088 - protein, 602 aa, Homo sapiens
VGGDAMTPIVTVLICLGLSLGPRTRVQTGTIPKPTLWAEPDSVITQGSPVTLSCQGSLEAQEYRLYREKKSASWITRIRPELVKNGQFHIPSITWEHTGRYGCQYYSRARWSELSDPLVLVMTGAYPKPTLSAQPSPVVTSGGRVTLQCESQVAFGGFILCKEGEDEHPQCLNSQPHARGSSRAIFSVGPVSPNRRWSHRCYGYDLNSPYVWSSPSDLLELLVPGVSKKPSLSVQPGPVMAPGESLTLQCVSDVGYDRFVLYKEGERDLRQLPGRQPQAGLSQANFTLGPVSRSYGGQYRCYGAHNLSSECSAPSDPLDILITGQIRGTPFISVQPGPTVASGENVTLLCQSWRQFHTFLLTKAGAADAPLRLRSIHEYPKYQAEFPMSPVTSAHAGTYRCYGSLNSDPYLLSHPSEPLELVVSGPSMGSSPPPTGPISTPGPEDQPLTPTGSDPQSGLGRHLGVVIGILVAVVLLLLLLLLLFLILRHRRQGKHWTSTQRKADFQHPAGAVGPEPTDRGLQWRSSPAADAQEENLYAAVKDTQPEDGVEMDTRAAASEAPQDVTYAQLHSLTLRRKATEPPPSQEREPPAEPSIYATLAIH

SEQ ID NO: 69089 - protein, 55 aa, Homo sapiens
MQTVYYGSLGLWLALVDGLVRSSPSLDQMFDAEILGFSTPPGRLSMMSFILNALT

SEQ ID NO: 69090 - protein, 18 aa, Homo sapiens
LKCYHFVLMMFFYQPCLG

SEQ ID NO: 69091 - protein, 56 aa, Homo sapiens
VAFTAAMRSCASWTWFLLCSWTRPRSTGSLGSSPGAPASPGAVPGKCVRSFRRTHT

SEQ ID NO: 69092 - protein, 310 aa, Homo sapiens [sequence omitted]

SEQ ID NO: 69093 - protein, 99 aa, Homo sapiens [sequence omitted]

SEQ ID NO: 69094 - protein, 132 aa, Homo sapiens
MIILGLVFIFQFVISCSCLAINRSKQTDVINASWWVMSNKTRDELERSFDCCGLFNLTTLYQQDYDFCTAICKSQSPTCQMCGEKFLKHSDEALKILGGVGLFFSFTEILGVWLAMRFRNQKDPRANPSAFL

SEQ ID NO: 69095 - protein, 70 aa, Homo sapiens
MEEIKKVLLLVLGCAVQCERKEEFIERIKQLDIETQAGIVAHIQEVGAWPRGGLSCGLLLLWWPGGKTSL

SEQ ID NO: 69096 - protein, 321 aa, Homo sapiens
MGHLSAPLHRVRVPWQGLLLTASLLTFWNPPTTAQLTTESMPFNVAEGKEVLLLVHNLPQQLFGYSWYKGERVDGNRQIVGYAIGTQQATPGPANSGRETIYPNASLLIQNVTQNDTGFYTLQVIKSDLVNEEATGQFHVYPELPKPSISSNNSNPVEDKDAVAFTCEPETQDTTYLWWINNQSLPVSPRLQLSNGNRTLTLLSVTRNDTGPYECEIQNPVSANRSDPVTLNVTYGPDTPTISPSDTYYRPGANLSLSCYAASNPPAQYSWLINGTFQQSTQELFIPNITVNNSGSYTCHANNSVTGCNRTTVKTIIVTGK

SEQ ID NO: 69097 - protein, 81 aa, Homo sapiens
MDWLPWSLLLFSLMCETSAFYVPGVAPINFHQNDPVEIKAVKLTSSRTQLPYEYYSLPFCQPSKITYKAENLGRRKERTGS

SEQ ID NO: 69098 - protein, 17 aa, Homo sapiens
MLKIIEVFMIQHLLLFL

SEQ ID NO: 69099 - protein, 160 aa, Homo sapiens
MSLVLLFLIRTALFAPQGAAAEPHSLCYNLTVLSQDGSVQSGFLAEGHLDGQLFLLCDRQKGRAGPRGQWAEAVLGAETWDTETEDLTENGQELRRTLAHIKGQKGALHSLQEIRVCEIRKPAAPGALGISTHMGSSSSLPTWRLSNGQCPGPPELRLWL

SEQ ID NO: 69100 - protein, 132 aa, Homo sapiens
MPALLPVASRLLLLPRVLLTMASGSPPTQPSPASDSGSGYVPGSVSAAFVTCPNEKVAKEIARAVVEKRLAACVNLIPQITSIYEWKGKIEEDSEVLMFCAPLRSGRGNCIACGTGELSVPAVGAPGHRVSF

SEQ ID NO: 69101 - protein, 105 aa, Homo sapiens
MGCLLLLLCTPVGLSRMFTVMGQLLVKPTILEDLDEQIYIITLEEEALQRRLNGLSSSVEYNIMELEQELENVKTLKTKLDHWKLCVHLGFELCSACDVENTGNH

SEQ ID NO: 69102 - protein, 421 aa, Homo sapiens
MLRAALLLISLPWGAQGTASTSLSTAGGHTVPPTGGRYLSIGDGSVMEFEFPEDSEGIIVISSQYPGQANRTAPGPMLRVTSLDTEVLTIKNLVDAHEAPPTLIEERRDFCIKVSPAEDTPATLSADLAHFSENPILYLLLPLIFVNKCSFGCKVELEVLKGLMQSPQPMLLGLLGQFLVMPLYAFLMAKVFMLPKALALGLIITCSSPGGGGSYLFSLLLGGDVTLAISMTFLSTVAATGFLPLSSAIYSRLLSIHETLHVPISKILGTLLFIAIPIAVGVLIKSKLPKFSQLLLQVVKPFSFVLLLGGLFLAYRMGVFILAGIRLPIVLVGITVPLVGLLVGYCLATCLKLPVAQRRTVSIEVGVQNSLLALAMLQLSLRRLQADYASQAPFIVALSGTSEMLALVIGHFIYSSLFPVP

SEQ ID NO: 69103 - protein, 19 aa, Homo sapiens
LLYSGVFVAFWACALAVGS

SEQ ID NO: 69104 - protein, 23 aa, Homo sapiens
MAFLLPLIIVLMVKHSDSPCVKL

SEQ ID NO: 69105 - protein, 57 aa, Homo sapiens
IFTVLLVLFFIFTYFKVPETKGRTFDEIASGFRQGGASQSDKTPEELFHPLGADSQV

SEQ ID NO: 69106 - protein, 42 aa, Homo sapiens
IPAIVCLGFLLLLNVGQLLAQTKKVVRPTRKKTLSTFKESWK

SEQ ID NO: 69107 - protein, 232 aa, Homo sapiens
LELLLLPLSLLVTSIQGHLVHMTVVSGSNVTLNISESLPENYKQLTWFYTFDQKIVEWDSRKSKYFESKFKGRVRLDPQSGALYISKVQKEDNSTYIMRVLKKTGNEQEWKIKLQVLDPVPKPVIKIEKIEDMDDNCYLKLSCVIPGESVNYTWYGDKRPFPKELQNSVLETTLMPHNYSRCYTCQVSNSVSSKNGTVCLSPPCTLARSFGVEWIASWLVVTVPTILGLLLT

SEQ ID NO: 69108 - protein, 37 aa, Homo sapiens
VWVGGSILASLSTFQQMWISKQEYDESGPSIVHRKCF

SEQ ID NO: 69109 - protein, 48 aa, Homo sapiens
KIIAPPKRKYSVWVGGSILASLSTFQQMWISKQEYDESGPSIVHRKCF

SEQ ID NO: 69110 - protein, 37 aa, Homo sapiens; identical to SEQ ID NO: 69108

SEQ ID NO: 69111 - protein, 176 aa, Homo sapiens
VVASRKPVALAAWLALYIASHFAQQPCKADQLTEEQIAEFKEAFSLFDKDGDGTITTKELGTVMRSLGQNPTEAELQDMINEVDADGNGTIDFPEFLTMMARKMKDTDSEEEIREAFRVFDKDGNGYISAAELRHVMTNLGEKLTDEEVDEMIREADIDGDGQVNYEEFVQMMTAK

SEQ ID NO: 69112 - protein, 37 aa, Homo sapiens
VWVGGSILASLSTFQQMWISKQEYDESGPSIVHRKCL

SEQ ID NO: 69113 - protein, 37 aa, Homo sapiens; identical to SEQ ID NO: 69108

SEQ ID NO: 69114 - protein, 96 aa, Homo sapiens
KLAVALLAAFLISAALCEGAVLPRSAKELRCQCIKTYSKPFHPKFIKELRVIESGPHCANTEIIVKLSDGRELCLDPKENWVQRVVEKFLKRAENS

SEQ ID NO: 69115 - protein, 16 aa, Homo sapiens
LLITMVVISSLNAGFI

SEQ ID NO: 69116 - protein, 20 aa, Homo sapiens
LEVLGLLGGVIMMVLIAHLE

SEQ ID NO: 69117 - protein, 29 aa, Homo sapiens
LLLKSVVYFAIITCCLLRRTAFCCNGEKS

SEQ ID NO: 69118 - protein, 34 aa, Homo sapiens
LKVFIPSLFLSHVLALGLGIYIGKRLSTPSASTY

SEQ ID NO: 69119 - protein, 43 aa, Homo sapiens
KPVFRKMLFPILLQTMFSAYLGSEQYKLLIKALQLSEPGKEIH

SEQ ID NO: 69120 - protein, 32 aa, Homo sapiens
MIAVSGICILLNVTELCYLLIRYCSGKSKKPV

SEQ ID NO: 69121 - protein, 37 aa, Homo sapiens
MLIGFIIYFGYGLWHSEEASLDADQARTPDGNLDQCK

SEQ ID NO: 69122 - protein, 201 aa, Homo sapiens
LLLFLLGPRLVLAISFHLPINSRKCLREEIHKDLLVTGAYEISDQSGGAGGLRSHLKITDSAGHILYSKEDATKGKFAFTTEDYDMFEVCFESKGTGRIPDQLVILDMKHGVEAKNYEEIAKVEKLKPLEVELRRLEDLSESIVNDFAYMKKREEEMRDTNESTNTRVLYFSIFSMFCLIGLATWQVFYLRRFFKAKKLIE

SEQ ID NO: 69123 - protein, 27 aa, Homo sapiens
ILLYVLRLDRLMKWLFWPLLVSVQFHP

SEQ ID NO: 69124 - protein, 76 aa, Homo sapiens
ITFSFFSIFSWGVLASLAYQRYKAGVDDFIQNYVDPTPDPNTAYASYPGASVDNYQQPPFTQNAETTEGYQPPPVY

SEQ ID NO: 69125 - protein, 16 aa, Homo sapiens
IFISMILFIRIMPKLK

SEQ ID NO: 69126 - protein, 38 aa, Homo sapiens
IMIALALAVIITSYNIWNMDPGYDSIIYRMTNQKIRMD

SEQ ID NO: 69127 - protein, 38 aa, Homo sapiens
MLVVAFGLLVLYILLASSWKRPEPGILTDRQPLLHDGE

SEQ ID NO: 69128 - protein, 502 aa, Homo sapiens
MQLVYCVFFFLLVCRSNKSPWVCLTCSSVHCGRYVNGHAKKHYEDAQVPLTNHKKSEKQDKVQHTVCMDCSSYSTYCYRCDDFVVNDTKLGLVQKVREHLQNLENSAFTADRHKKRKLLENSTLNSKLLKVNGSTTAICATGLRNLGNTCFMNAILQSLSNIEQFCCYFKELPAVELRNGKTAGRRTYHTRSQGDNNVSLVEEFRKTLCALWQGSQTAFSPESLFYVVWKIMPNFRGYQQQDAHEFMRYLLDHLHLELQGGFNGVSRSAILQENSTLSASNKCCINGASTVVTAIFGGILQNEVNCLICGTESRKFDPFLDLSLDIPSQFRSKRSKNQENGPVCSLRDCLRSFTDLEELDETELYMCHKCKKKQKSTKKFWIQKLPKVLCLHLKRFHWTAYLRNKVDTYVEFPLRGLDMKCYLLEPENSGPESCLYDLAAVVVHHGSGVGSGHYTAYATHEGRWFHFNDSTVTLTDEETVVKAKAYILFYVEHQAKAGSDKL

SEQ ID NO: 69129 - protein, 61 aa, Homo sapiens
MIVSSALMIWKGLIVLTGSESPIVVVLSGSMEPAFHRGDLLFLTNFREDPIRAEIMETSNF

SEQ ID NO: 69130 - protein, 1331 aa, Homo sapiens
MEDFKCPIFLGCIICVTGLCGLDRKEVQQLTVKHGGQYMGQLKMNECTHLIVQEPKGQKYECAKRWNVHCVTTQWFFDSIEKGFCQDESIYKTEPRPEAKTMPNSSTPTSQINTIDSRTLSDVSNISNINASCVSESICNSLNSKLEPTLENLENLDVSAFQAPEDLLDGCRIYLCGFSGRKLDKLRRLINSGGGVRFNQLNEDVTHVIVGDYDDELKQFWNKSAHRPHVVGAKWLLECFSKGYMLSEEPYIHANYQPVEIPVSHKPESKAALLKKKNSSFSKKDFAPSEKHEQADEDLLSQYENGSSTVVEAKTSEARPFNDSTHAEPLNDSTHISLQEENQSSVSHCVPDVSTITEEGLFSQKSFLVLGFSNENESNIANIIKENAGKIMSLLSRTVADYAVVPLLGCEVEATVGEVVTNTWLVTCIDYQTLFDPKSNPLFTPVPVMTGMTPLEDCVISFSQCAGAEKESLTFLANLLGASVQEYFVRKSNAKKGMFASTHLILKERGGSKYEAAKKWNLPAVTIAWLLETARTGKRADESHFLIENSTKEERSLETEITNGINLNSDTAEHPGTRLQTHRKTVVTPLDMNRFQSKAFRAVVSQHARQVAASPAVGQPLQKEPSLHLDTPSKFLSKDKLFKPSFDVKDALAALETPGRPSQQKRKPSTPLSEVIVKNLQLALANSSRNAVALSASPQLKEAQSEKEEAPKPLHKVVVCVSKKLSKKQSELNGIAASLGADYRWSFDETVTHFIYQGRPNDTNREYKSVKERGVHIVSEHWLLDCAQECKHLPESLYPHTYNPKMSLDISAVQDGRLCNSRLLSAVSSTKDDEPDPLILEENDVDNMATNNKESAPSNGSGKNDSKGVLTQTLEMRENFQKQLQEIMSATSIVKPQGQRTSLSRSGCNSASSTPDSTRSARSGRSRVLEALRQSRQTVPDVNTEPSQNEQIIWDDPTAREERARLASNLQWPSCPTQYSELQVDIQNLEDSPFQKPLHDSEIAKQAVCDPGNIRVTEAPKHPISEELETPIKDSHLIPTPQAPSIAFPLANPPVAPHPREKIITIEETHEELKKQYIFQLSSLNPQERIDYCHLIEKLGGLVIEKQCFDPTCTHIVVGHPLRNEKYLASVAAGKWVLHRSYLEACRTAGHFVQEEDYEWGSSSILDVLTGINVQQRRLALAAMRWRKKIQQRQESGIVEGAFSGWKVILHVDQSREAGFKRLLQSGGAKVLPGHSVPLFKEATHLFSDLNKLKPDDSGVNIAEAAAQNVYCLRTEYIADYLMQESPPHVENYCLPEAISFIQNNKELGTGLSQKRKAPTEKNKIKRPRVH

SEQ ID NO: 69131 - protein, 1326 aa, Homo sapiens [sequence omitted]

SEQ ID NO: 69132 - protein, 668 aa, Homo sapiens
MGFGAFAALTTFWYATRPKPLKPPCDLSMQSVEVAGSGGARRSALLDSDEPLVYFYDDVTTLYEGFQRGIQVSNNGPCLGSRKPDQPYEWLSYKQVAELSECIGSALIQKGFKTAPDQFIGIFAQNRPEWVIIEQGCFAYSMVIVPLYDTLGNEAITYIVNKAELSLVFVDKPEKAKLLLEGVENKLIPGLKIIVVMDAYGSELVERGQRCGVEVTSMKAMEDLGRANRRKPKPPAPEDLAVICFTSGTTGNPKGAMVTHRNIVSDCSAFVKATEKALPLSASDTHISYLPLAHIYEQLLKCVMLCHGAKIGFFQGDIRLLMDDLKVLQPTVFPVVPRLLNRMFDRIFGQANTTLKRWLLDFASKRKEAELRSGIIRNNSLWDRLIFHKVQSSLGGRVRLMVTGAAPVSATVLTFLRAALGCQFYEGYGQTECTAGCCLTMPGDWTAGHVGAPMPCNLIKLVDVEEMNYMAAEGEGEVCVKGPNVFQGYLKDPAKTAEALDKDGWLHTGDIGKWLPNGTLKIIDRKKHIFKLAQGEYIAPEKIENIYMRSEPVAQVFVHGESLQAFLIAIVVPDVETLCSWAQKRGFEGSFEELCRNKDVKKAILEDMVRLGKDSGLKPFEQVKGITLHPELFSIDNGLLTPTMKAKRPELRNYFRSQIDDLYSTIKV

SEQ ID NO: 69133 - protein, 77 aa, Homo sapiens [sequence omitted]

SEQ ID NO: 69134 - protein, 266 aa, Homo sapiens
MLSALGMLAAGGAGLAMALHSAVSASDLELHPPSYPWSHRGLLSSLDHTSIRRGFQVYKQVCASCHSMDFVAYRHLVGVCYTEDEAKELAAEVEVQDGPNEDGEMFMRPGKLFDYFPKPYPNSEAARAANNGALPPDLSYIVRARHGGEDYVFSLLTGYCEPPTGVSLREGLYFNPYFPGQAIAMAPPIYTDVLEFDDGTPATMSQIAKDVCTFLRWASEPEHDHRKRMGLKMLMMMALLVPLVYTIKRHKWSVLKSRKLAYRPPK

SEQ ID NO: 69135 - protein, 414 aa, Homo sapiens [sequence omitted]

SEQ ID NO: 69136 - protein, 54 aa, Homo sapiens
RWVMISFVCCLFLKENNPKGRSSKYGLLHCGNTEKDGKSPLTAHDARHTKAICL

SEQ ID NO: 69137 - protein, 240 aa, Homo sapiens
LLGTTCLIATAVITLFNEPSAEDSKKGPLTVAQKKAQNIMESFENPFRMFLPSLGHRAPVSQAAKFDPSTKIYEISNRWKLAQVQVQKDSKEAVKKKAAEQTAAREQAKEACKAAAEQAISVRQQVVLENAAKKRERATSDPRTTEQKQEKKRLKISKKPKDPEPPEKEFTPYDYSQSDFKAFAGNSKSKVSSQFDPNKQTPSGKKCIAAKKIKQSVGNKSMSFPTGKSDRGFRYNWPQR

SEQ ID NO: 69138 - protein, 297 aa, Homo sapiens
TILSAVSLLLKFEMLYLIGLGLGDAKDITVKGLEVVRRCSRVYLEAYTSVLTVGKEALEEFYGRKLVVADREEVEQEADNILKDADISDVAFLVVGDPFGATTHSDLVLRATKLGIPYRVIHNASIMNAVGCCGLQLYKFGETVSIVFWTDTWRPESFFDKVKKNRQNGMHTLCLLDIKVKEQSLENLIKGRKIYEPPRYMSVNQAAQQLLEIVQNQRIRGEEPVTEETLCVGLARVGADDQKIAAGTLRQMCTVDLGEPLHSLIITGGSIHPMEMEMLSLFSIPENSSESQSINGL

SEQ ID NO: 69139 - protein, 327 aa, Homo sapiens
LTFVLFLSLAFGASYGTGGRMMNCPKILRQLGSKVLLPLTYERINKSMNKSIHIVVTMAKSLENSVENKIVSLDPSEAGPPRYLGDRYKFYLENLTLGIRESRKEDEGWYLMTLEKNVSVQRFCLQLRLYEQVSTPEIKVLNKTQENGTCTLILGCTVEKGDHVAYSWSEKAGTHPLNPANSSHLLSLTLGPQHADNIYICTVSNPISNNSQTFSPWPGCRTDPSETKPWAVYAGLLGGVIMILIMVVILQLRRRGKTNHYQTTVEKKSLTIYAQVQKPGPLQKKLDSFPAQDPCTTIYVAATEPVPESVQETNSITVYASVTLPES

SEQ ID NO: 69140 - protein, 136 aa, Homo sapiens
VILSALFLGTLACFCVWRRKRKEKQSETSPKEFLTIYEDVKDLKTRRNHEQEQTFPGGGSTIYSMIQSQSSAPTSQEPAYTLYSLIQPSRKSGSRKRNHSPSFNSTIYEVIGKSQPKAQNPARLSRKELENFDVYS

SEQ ID NO: 69141 - protein, 28 aa, Homo sapiens
MRMKAEVCAFFFFSFLVVCTSLGMEGNK

SEQ ID NO: 69142 - protein, 20 aa, Homo sapiens
KITIMAVFLCLKTVKQERII

SEQ ID NO: 69143 - protein, 69 aa, Homo sapiens
ILMCFWYLTSANIPSETLRGASVFQVKLGNQNVETKQLLSASYEFQREFTQGVKPDWTIARIEHSKLLE

SEQ ID NO: 69144 - protein, 161 aa, Homo sapiens
LRSLHMLLMLALNRVTASHPFMTAVDLMEASQLCSMDSKANIVHGLSVLEICLIIAMKHLNDIYEEEPFNFQMVYNEFQKFVQRKAHSVYNFEKPVVMKAFEHLQQLELIKPMERTSGNSQREYQLMKLLLDNTQIMNALQKYPNCPTDVRQWATSSLSWL

SEQ ID NO: 69145 - protein, 24 aa, Homo sapiens
LCSLGMLLCLCIWSLFGATVDRHL

SEQ ID NO: 69146 - protein, 15 aa, Homo sapiens
THCLGLLFYVLQATP

SEQ ID NO: 69147 - protein, 28 aa, Homo sapiens
MYLSYLVLFCHFFFEAYIGKMRKTTKAE

SEQ ID NO: 69148 - protein, 129 aa, Homo sapiens
IQLMPIIVLILVSLLSQLMVSNPPYSLYPRSGTGQTIKMQTENLGVVYYVNKDFKNEYKGMLLQKVEKSVEEDYVTNIRNNCWKERQQKTDMQYAAKVYRDDRLRRKADALSMDNCKELERLTSLYKGG

SEQ ID NO: 69149 - protein, 540 aa, Homo sapiens
LLLATLLAAMLALLTQVALVVQVAEAARAPSVSAKPGPALWPLPLLVKMTPNLLHLAPENFYISHSPNSTAGPSCTLLEEAFRRYHGYIFGFYKWHHEPAEFQAKTQVQQLLVSITLQSECDAFPNISSDESYTLLVKEPVAVLKANRVWGALRGLETFSQLVYQDSYGTFTINESTIIDSPRFSHRGILIDTSRHYLPVKIILKTLDAMAFNKFNVLHWHIVDDQSFPYQSITFPELSNKGSYSLSHVYTPNDVRMVIEYARLRGIRVLPEFDTPGHTLSWGKGQKDLLTPCYSRQNKLDSFGPINPTLNTTYSFLTTFFKEISEVFPDQFIHLGGDEVEFKCWESNPKIQDFMRQKGFGTDFKKLESFYIQKVLDIIATINKGSIVWQEVFDDKAKLAPGTIVEVWKDSAYPEELSRVTASGFPVILSAPWYLDLISYGQDWRKYYKVEPLDFGGTQKQKQLFIGGEACLWGEYVDATNLTPRLWPRASAVGERLWSSKDVRDMDDAYDRLTRHRCRMVERGIAAQPLYAGYCNHENM

SEQ ID NO: 69150 - protein, 19 aa, Homo sapiens
RWTFLTCILPILRRVCVSL

SEQ ID NO: 69151 - protein, 149 aa, Homo sapiens
LLLSILGLAFLSEAAARKIPKVGHTFFQKPESCPPVPGGSMKLDIGIINENQRVSMSRNIESRSTSPWNYTVTWDPNRYPSEVVQAQCRNLGCINAQGKEDISMNSVPIQQETLVVRRKHQGCSVSFQLEKVLVTVGCTCVTPVIHHVQ

SEQ ID NO: 69152 - protein, 12 aa, Homo sapiens
LGLFLIIILWVK

SEQ ID NO: 69153 - protein, 491 aa, Homo sapiens
KLLLLHPAFQSCLLLTLLGLWRTTPEAHASSLGAPAISAASFLQDLIHRYGEGDSLTLQQLKALLNHLDVGVGRGNVTQHVQGHRNLSTCFSSGDLFTAHNFSEQSRIGSSELQEFCPTILQQLDSRACTSENQENEENEQTEEGRPSAVEVWGYGLLCVTVISLCSLLGASVVPFMKKTFYKRLLLYFIALAIGTLYSNALFQLIPEAFGFNPLEDYYVSKSAVVFGGFYLFFFTEKILKILLKQKNEHHHGHSHYASESLPSKKDQEEGVMEKLQNGDLDHMIPQHCSSELDGKAPMVDEKVIVGSLSVQDLQASQSACYWLKGVRYSDIGTLAWMITLSDGLHNFIDGLAIGASFTVSVFQGISTSVAILCEEFPHELGDFVILLNAGMSIQQALFFNFLSACCCYLGLAFGILAGSHFSANWIFALAGGMFLYISLADMFPEMNEVCQEDERKGSILIPFIIQNLGLLTGFTIMVVLTMYSGQIQIG

SEQ ID NO: 69154 - protein, 75 aa, Homo sapiens
ILVSFGLFMYAKRNKRRIMRIFSVPPTEETLSEPNFYDTISKIRLRQQLEMYSISRKYDYQQPQNQADSVQLSLE

SEQ ID NO: 69155 - protein, 31 aa, Homo sapiens
MGFAVSVVGTSGGLIVSLLPAFLRPGAERCL

SEQ ID NO: 69156 - protein, 18 aa, Homo sapiens
IFLLLTGPTYLLFKLSPG

SEQ ID NO: 69157 - protein, 63 aa, Homo sapiens
LRRRTILLLYYLLRSPFYDRFSEARILFLLQLLADHVPGVGLVTRPLMDYLPTWQKIYFYSWG

SEQ ID NO: 69158 - protein, 384 aa, Homo sapiens
ITSKICLSILACFADGILPLDLDASELLSDTFEVLSSKEIKLLAMRSKPDKDLLMEEDDMALANVVMQEAQKKLISQVQKRNFIENIIPIIISLKTVLEKNKIPALRELMHYLREVMQDYRDELKDFFAVDKQLASELEYDMKKYQEQLVQEQELAKHADVAGTAGGAEVAPVAQVALCLETVPVPAGQENPAMSPAVSQPCTPRASAGHVAVSSPTPETGPLQRLLPKARPMSLSTIAILNSVKKAVESKSRHRSRSLGVLPFTLNSGSPEKTCSQVSSYSLEQESNGEIEHVTKRAISTPEKSISDVTFGAGVSYIGTPRTPSSAKEKIEGRSQGNDILCLSLPDKPPPQPQQWNVRSPARNKDTPACSRRSLRKTPLKTAN

SEQ ID NO: 69159 - protein, 661 aa, Homo sapiens
LSSLLGLLLLGLLLPASLTGGVGSLNLEELSEMRYGIEILPLPVMGGQSQSSDVVIVSSKYKQRYECRLPAGAIHFQREREEETPAYQGPGIPELLSPMRDAPCLLKTKDWWTYEFCYGRHIQQYHMEDSEIKGEVLYLGYYQSAFDWDDETAKASKQHRLKRYHSQTYGNGSKCDLNGRPREAEVRFLCDEGAGISGDYIDRVDEPLSCSYVLTIRTPRLCPHPLLRPPPSAAPQAILCHPSLQPEEYMAYVQRQADSKQYGDKIIEELQDLGPQVWSETKSGVAPQKMAGASPTKDDSKDSDFWKMLNEPEDQAPGGEEVPAEEQDPSPEAADSASGAPNDFQNNVQVKVIRSPADLIRFIEELKGGTKKGKPNIGQEQPVDDAAEVPQREPEKERGDPERQREMEEEEDEDEDEDEDEDERQLLGEFEKELEGILLPSDRDRLRSEVKAGMERELENIIQETEKELDPDGLKKESERDRAMLALTSTLNKLIKRLEEKQSPELVKKHKKKRVVPKKPPPSPQPTEEDPEHRVRVRVTKLRLGGPNQDLTVLEMKRENPQLKQIEGLVKELLEREGLTAAGKIEIKIVRPWAEGTEEGARWLTDEDTRNLKEIFFNILVPGAEEAQKERQRQKELESNYRRVWGSPGGEGTGDLDEFDF

SEQ ID NO: 69160 - protein, 42 aa, Homo sapiens
IIYNMILSHLLHLCAHTCEGLGPASTTALPQTQLSTSRQALL

SEQ ID NO: 69161 - protein, 164 aa, Homo sapiens
LATSCLLLLALLVQGGAAAPISSHCRLDKSNFQQPYITNRTFMLAKEASLADNNTDVRLIGEKLFHGVSMSERCYLMKQVLNFTLEEVLFPQSDRFQPYMQEVVPFLARLSNRLSTCHIEGDDLHIQRNVQKLKDTVKKLGESGEIKAIGELDLLFMSLRNACI

SEQ ID NO: 69162 - protein, 67 aa, Homo sapiens
MISASVICMLLNVAELCYLLLKVCFRRSKRAQTQKNHPNHALKESKQNEMNELISDSGQNAITGFPS

SEQ ID NO: 69163 - protein, 61 aa, Homo sapiens
MGKRKCIGETIARWEVFLFLAILLQRVEFSVPLGVKVDMTPIYGLTMKHACCEHFQMQLRS

SEQ ID NO: 69164 - protein, 45 aa, Homo sapiens
MIASYVVVSSLISCWFSPRPLTQQNTSCDFLPAMKSAEFEGLYQE

SEQ ID NO: 69165 - protein, 227 aa, Homo sapiens
RLALSPVPSHWMVALLLLLSAEPVPAARSEDRYRNPKGSACSRIWQSPRFIARKRGFTVKMHCYMNSASGNVSWLWKQEMDENPQQLKLEKGRMEESQNESLATLTIQGIRFEDNGIYFCQQKCNNTSEVYQGCGTELRVMGFSTLAQLKQRNTLKDGIIMIQTLLIILFIIVPIFLLLDKDDSKAGMEEDHTYEGLDIDQTATYEDIVTLRTGEVKWSVGEHPGQE

SEQ ID NO: 69166 - protein, 50 aa, Homo sapiens
IPFTILLFFLLHRWCSDKKNAAVMDQEPAGNRTVNSEDSDEQDHQEVSYA

SEQ ID NO: 69167 - protein, 77 aa, Homo sapiens
IILLFCAVVPGTLLLFRKRWQNEKLGLDAGDEYEDENLYEGLNLDDCSMYEDISRGLQGTYQDVGSLNIGDVQLEKP

SEQ ID NO: 69168 - protein, 541 aa, Homo sapiens
VSERRGLGRGSPAEWGQRLLLVLLLGGCSGRIHQLALTGEKRADIQLNSFGFYTNGSLEVELSVLRLGLREAEEKSLLVGFSLSRVRSGRVRSYSTRDFQDCPLQKNSSSFLVLFLINTKDLQVQVRKYGEQKTLFIFPGLLPEAPSKPGLPKPQATVPRKVDGGGTSAASKPKSTPAVIQGPSGKDKDLVLGLSHLNNSYNFSFHVVIGSQAEEGQYSLNFHNCNNSVPGKEHPFDITVMIREKNPDGFLSAAEMPLFKLYMVMSACFLAAGIFWVSILCRNTYSVFKIHWLMAALAFTKSISLLFHSINYYFINSQGHPIEGLAVMYYIAHLLKGALLFITIALIGSGWAFIKYVLSDKEKKVFGIVIPMQVLANVAYIIIESREEGASDYVLWKEILFLVDLICCGAILFPVVWSIRHLQDASGTDGKVAVNLAKLKLFRHYYVMVICYVYFTRIIAILLQVAVPFQWQWLYQLLVEGSTLAFFVLTGYKFQPTGNNPYLQLPQEDEEDVQMEQVMTDSGFREGLSKVNKTASGRELL

SEQ ID NO: 69169 - protein, 54 aa, Homo sapiens
IMGLLYKVLGVLFFAIACFLYKPLSESSDGLETCLPSQSSAPDSATDSQLQSSV

SEQ ID NO: 69170 - protein, 36 aa, Homo sapiens
LKQQTMLGLLFHLLLRSPTLMVLERRCRNWEKVKGL

SEQ ID NO: 69171 - protein, 194 aa, Homo sapiens
VDSIHGKNLVAILHLLVSLAMHFRAPIRLPEHVTVQVVVVRKREGLLHSSHISEELTTTTEMMMGRFERDAFDTLFDHAPDKLSVVKKSLITFVNKHLNKLNLEVTELETQFADGVYLVLLMGLLEDYFVPLHHFYLTPESFDQKVHNVSFAFELMLDGGLKKPKARPEDVVNLDLKSTLRVLYNLFTKYKNVE

SEQ ID NO: 69172 - protein, 66 aa, Homo sapiens
RVILIFHSVALCLASLNSCLDPVIYYFSTNEFRRRLSRQDLHDSIQLHAKSFVSNHTASTMTPELC

SEQ ID NO: 69173 - protein, 107 aa, Homo sapiens
MRSLLRTPFLCGLLWAFCAPGARAEEPAASFSQPGSMGLDKNTVHDQEHIMEHLEGVINKPEAEMSPQELQLHYFKMHDYDGNNLLDGLELSTAITHVHKEGVNRHH

SEQ ID NO: 69174 - protein, 367 aa, Homo sapiens
MPLALLVLLLLGPGGWCLAEPPRDSLREELVITPLPSGDVAATFQFRTRWDSELQREGVSHYRLFPKALGQLISKYSLRELHLSFTQGFWRTRYWGPPFLQAPSGAELWVWFQDTVTDVDKSWKELSNVLSGIFCASLNFIDSTNTVTPTASFKPLGLANDTDHYFLRYAVLPREVVCTENLTPWKKLLPCSSKAGLSVLLKADRLFHTSYHSQAVHIRPVCRNARCTSISWELRQTLSVVFDAFITGQGKKDWSLFRMFSRTLTEPCPLASESRVYVDITTYNQDNETLEVHPPPTTTYQDVILGTRKTYAIYDLLDTAMINNSRNLNIQLKWKRPPENGEWVVGWTAGLQRLQRKDSQSHVFAVR

SEQ ID NO: 69175 - protein, 45 aa, Homo sapiens
LAVGGLLFYRWRRRSHQEPQRADSPLEQPEGSPLTQDDRQVELPV

SEQ ID NO: 69176 - protein, 7 aa, Homo sapiens
TVTILLL

SEQ ID NO: 69177 - protein, 175 aa, Homo sapiens
KPQRSQLQIFSSVLQTSLLFLLMGLRASGKDSAPTVVSGILGGSVTLPLNISVDTEIENVIWIGPKNALAFARPKENVTIMVKSYLGRLDITKWSYSLCISNLTLNDAGSYKAQINQRNFEVTTEEEFTLFVYAPFIEKLSVHVIEGDHRTLLEGSGLESIISTLAEPRVSVREG

SEQ ID NO: 69178 - protein, 374 aa, Homo sapiens
VPAALPLLGELPRLLLLVLLCLPAVWGDCGLPPDVPNAQPALEGRTSFPEDTVITYKCEESFVKIPGEKDSVICLKGSQWSDIEEFCNRSCEVPTRLNSASLKQPYITQNYFPVGTVVEYECRPGYRREPSLSPKLTCLQNLKWSTAVEFCKKKSCPNPGEIRNGQIDVPGGILFGATISFSCNTGYKLFGSTSSFCLISGSSVQWSDPLPECREIYCPAPPQIDNGIIQGERDHYGYRQSVTYACNKGFTMIGEHSIYCTVNNDEGEWSGPPPECRGKSLTSKVPPTVQKPTTVNVPTTEVSPTSQKTTTKTTTPNAQATRSTPVSRTTKHFHETTPNKGSGTTSGTTRLLSGHTCFTLTGLLGTLVTMGLLT

SEQ ID NO: 69179 - protein, 22 aa, Homo sapiens
LCHKYLIGVLAYLTELAIFQIE

SEQ ID NO: 69180 - protein, 9 aa, Homo sapiens
IFAFLFIHF

SEQ ID NO: 69181 - protein, 40 aa, Homo sapiens
VFMISFILCTTTTTTNSRNLLSAELIFQPFHKEDKLNGPF

SEQ ID NO: 69182 - protein, 383 aa, Homo sapiens
LALLALALCVPGARGRALEWFSAVVNIEYVDPQTNLTVWSVSESGRFGDSSPKEGAHGLVGVPWAPGGDLEGCAPDTRFFVPEPGGRGAAPWVALVARGGCTFKDKVLVAARRNASAVVLYNEERYGNITLPMSHAGTGNIVVIMISYPKGREILELVQKGIPVTMTIGVGTRHVQEFISGQSVVFVAIAFITMMIISLAWLIFYYIQRFLYTGSQIGSQSHRKETKKVIGQLLLHTVKHGEKGIDVDAENCAVCIENFKVKDIIRILPCKHIFHRICIDPWLLDHRTCPMCKLDVIKALGYWGEPGDVQEMPAPESPPGRDPAANLSLALPDDDGSDDSSPPSASPAESEPQCDPSFKGDAGENTALLEAGRSDSRHGGPIS

SEQ ID NO: 69183 - protein, 38 aa, Homo sapiens
LQGILSVIPLQLLAFHLAVLRGYDVDFPRNLAKSVTVE

SEQ ID NO: 69184 - protein, 75 aa, Homo sapiens
KLLLGIALLAYVASVWGNFVNMRSIQENGELKIESKIEEMVEPLREKIRDLEKSFTQKYPPVKFLSEKDRKRILF

SEQ ID NO: 69185 - protein, 258 aa, Homo sapiens
LCQFLVGMVTTCWSQVLTCLGTMLLEALDCILPPTRPTDKPLHLPLQDVYKIGGIGSVPVGRVETGVLKPGMVVTFAPVNVTTEVKSVEMHHEALSEALPGDNVGFNVKNVSVKDVRHGNVAGDSKNDPPMEAAGFTAQVIILNHPGQISTGYAPVLDCHTAHIACKFAELKEKIDHRSGKKLEDGPKFLKSVDAAIVDMVPGKPMCVESFSDYPSLGCFAVRDMRQIVTVGVIKAVDKKTAGAGKVTKSAQKAQKAK

SEQ ID NO: 69186 - protein, 127 aa, Homo sapiens
LMPIIVLILVSLLSQLMVSNPPYSLYPRSGTGQTIKMQTENLGVVYYVNKDFKNEYKGMLLQKVEKSVEEDYVTNIRNNCWKERQQKTDMQYAAKVYRDDRLRRKADALSMDNCKELERLTSLYKGG

SEQ ID NO: 69187 - protein, 14 aa, Homo sapiens
LWGFLLSLLLFMGV

SEQ ID NO: 69188 - protein, 37 aa, Homo sapiens
LGTLLVCVSIYLYGLPRQDTTSIQQGETASKERVIGV

SEQ ID NO: 69189 - protein, 45 aa, Homo sapiens
MIKPRIVLLIFVSGKVVLTGAKVRAEIYEAFENIYPILKGFRKTT

SEQ ID NO: 69190 - protein, 36 aa, Homo sapiens
RRWLFGGSEERLLLLLLLLVAPLQKSSKNSAVGSVR

SEQ ID NO: 69191 - protein, 294 aa, Homo sapiens
LLPLLSLLVGAWLKLGNGQATSMVQLQGGRFLMGTNSPDSRDGDGPVREATVKPFAIDIFPVTNKDFRDFVREKKYRTEAEMFGWSFVFEDFVSDELRNKATQPMKSVLWWLPVEKAFWRQPAGPGSGIRERLEHPVLHVSWNDARAYCAWRGKRLPTEEEWEFAARGGLKGQVYPWGNWFQPNRTNLWQGKFPKGDKAEDGFHGVSPVNAFPAQNNYGLYDLLGNVWEWTASPYQAAEQDMRVLRGASWIDTADGSANHRARVTTRMGNTPDSASDNLGFRCAADAGRPPGEL

SEQ ID NO: 69192 - protein, 70 aa, Homo sapiens
MAQLGAVVAVASSFFCASLFSAVHKIEEGHIGVYYRGGALLTSTSGPGFHLMLPFITSYKSVQWWCDDLL

SEQ ID NO: 69193 - protein, 14 aa, Homo sapiens
KLEIGILISFYLID

SEQ ID NO: 69194 - protein, 54 aa, Homo sapiens
LGLAVGLALLLYCYPPDPKGLPGTRRVLGFSPVIIDRHVSRYLLAFLADDLGGL

SEQ ID NO: 69195 - protein, 19 aa, Homo sapiens
VMMGALFLFIMHALLVMLK

SEQ ID NO: 69196 - protein, 14 aa, Homo sapiens
IGRRIVVLFSSLAV

SEQ ID NO: 69197 - protein, 79 aa, Homo sapiens
IDTAKSMLALLLGRTWPLFSVFYQYLEQSKYRVMNKDQWYNVLEFSRTVHADLSNYDEDGAWPVLLDEFVEWQKVRQTS

SEQ ID NO: 69198 - protein, 218 aa, Homo sapiens
LGVLFFQGVYIVFSLEIRADAHVRGYVGEKIKLKCTFKSTSDVTDKLTIDWTYRPPSSSHTVSIFHYQSFQYPTTAGTFRDRISWVGNVYKGDASISISNPTIKDNGTFSCAVKNPPDVHHNIPMTELTVTERGFGTMLSSVALLSILVFVPSAVVVALLLVRMGRKAAGLKKRSRSGYKKSSIEVSDDTDQEEEEACMARLCVRCAECLDSDYEETY

SEQ ID NO: 69199 - protein, 158 aa, Homo sapiens
LLCLLASGLVVFFLFPHSVLVDDDGIKVVKVTFNKQDSLVILTIMATLKIRNSNFYTVAVTSLSSQIQYMNTVVSTYVTTNVSLIPPRSEQLVNFTGKAEMGGPFSYVYFFCTVPEILVHNIVIFMRTSVKISYIGLMTQSSLETHHYVDCGGNSTAI

SEQ ID NO: 69200 - protein, 87 aa, Homo sapiens
TTATLLCLLSATALLCSLGHPRPHLLRLPDLPSFPAFLWIPASGHPSPPSLQGPLLVSLLLEPLPPPPSLQNFSFTPHPPPLPPFLF

SEQ ID NO: 69201 - protein, 59 aa, Homo sapiens
MVPFGLIFIVFAVHFYRSLVSHKTDRQFQELNELAEFARLQDQLDHRGDHPLTPGSHYA

SEQ ID NO: 69202 - protein, 242 aa, Homo sapiens
LARAGLLLLLLLLLLLGLLAPGAQGARGRGGAEKNSYRRTVNTFSQSVSSLFGEDNVRAAQKFLARLTERFVLGVDMFVETLWKVWTELLDVLGLDVSNLSQYFSPASVSSSPARALLLVGVVLLAYWFLSLTLGFTFSVLHVVFGRFFWIVRVVLFSMSCVYILHKYEGEPENAVLPLCFVVAVYFMTGPMGFYWRSSPSGPSNPSNPSVEEKLEHLEKQVRLLNIRLNRVLESLDRSKDK

SEQ ID NO: 69203 - protein, 67 aa, Homo sapiens
IWSYLIARIALKALIRGKVSKDDRSDVESSSEEEDVTTCTKSPCDSSSSNGANRVNGHMGGSYWAEE

SEQ ID NO: 69204 - protein, 417 aa, Homo sapiens
VRLLLILSGCLVYGTAETDVNVVMLQESQVCEKRASQQFCYTNVLIPKWHDIWTRIQIRVNSSRLVRVTQVENEEKLKELEQFSIWNFFSSFLKEKLNDTYVNVGLYSTKTCLKVEIIEKDTKYSVIVIRRFDPKLFLVFLLGLMLFFCGDLLSRSQIFYYSTGMTVGIVASLLIIIFILSKFMPKKSPIYVILVGGWSFSLYLIQLVFKNLQEIWRCYWQYLLSYVLTVGFMSFAVCYKYGPLENERSINLLTWTLQLMGLCFMYSGIQIPHIALAIIIIALCTKNLEHPIQWLYITCRKVCKGAEKPVPPRLLTEEEYRIQGEVETRKALEELREFCNSPDCSAWKTVSRIQSPKRFADFVEGSSHLTPNEVSVHEQEYGLGSIIAQDEIYEEASSEEEDSYSRCPAITQNNFLT

SEQ ID NO: 69205 - protein, 13 aa, Homo sapiens
LLFVCLFLFLQLK

SEQ ID NO: 69206 - protein, 84 aa, Homo sapiens
IFALFLLARRSRLRRAPPPPPRTAAALSPESLNSRFLFNPLHRITGVPHHVRRSRRRQLRNHHQGLKGEEGSCGRGRKWKRRPC

SEQ ID NO: 69207 - protein, 20 aa, Homo sapiens
VAALVLGCLIPLILSVGHQH

SEQ ID NO: 69208 - protein, 40 aa, Homo sapiens
LFLLLLFLLPIREEDRSCTLANNFARSFTLMLRYNGPPPT

SEQ ID NO: 69209 - protein, 51 aa, Homo sapiens
IARWEVFLFLAILLQRVEFSVPLGVKVDMTPIYGLTMKHACCEHFQMQLRS

SEQ ID NO: 69210 - protein, 283 aa, Homo sapiens
LLLLPLLLGLNAGAVIDWPTEEGKEVWDYVTVRKDAYMFWWLYYATNSCKNFSELPLVMWLQGGPGGSSTGFGNFEEIGPLDSDLKPRKTTWLQAASLLFVDNPVGTGFSYVNGSGAYAKDLAMVASDMMVLLKTFFSCHKEFQTVPFYIFSESYGGKMAAGIGLELYKAIQRGTIKCNFAGVALGDSWISPVDSVLSWGPYLYSMSLLEDKGLAEVSKVAEQVLNAVNKGLYREATELWGKAEMIIEQNTDGVNFYNILTKSTPTSTMESSLEFTQSHLVWF

SEQ ID NO: 69211 - protein, 14 aa, Homo sapiens
RSALWCLGLNAAFW

SEQ ID NO: 69212 - protein, 17 aa, Homo sapiens
LVGAFVGWTLFFQQNAL

SEQ ID NO: 69213 - protein, 44 aa, Homo sapiens
LGATHGLIFLPVLLSYIGPSVNKAKSCATEERYKGTERERLLNF

SEQ ID NO: 69214 - protein, 30 aa, Homo sapiens
IFFFFCIIVSSLPTAELGTENACSTCLLNE

SEQ ID NO: 69215 - protein, 19 aa, Homo sapiens
TVHNLCRILAVFLAEYLGL

SEQ ID NO: 69216 - protein, 38 aa, Homo sapiens
VEFKLVIAQVLLLDFCLALLADRVLQFFLGTPKLKVPS

SEQ ID NO: 69217 - protein, 8 aa, Homo sapiens
LLIVLLFA

SEQ ID NO: 69218 - protein, 34 aa, Homo sapiens
MYLWLKLLAFGFAFLDTEVFVTGQSPTPSPTGKN

SEQ ID NO: 69219 - protein, 398 aa, Homo sapiens
MQQPLVVLGVGVAGLLVNVLGLCLFHHHSGFSQDSGHGHSHGGHGHGHGLPKGPRVKSTRPGSSDINVAPGEQGPDQEETNTLVANTSNSNGLKLDPADPENPRSGDTVEVQVNGNLVREPDHMELEEDRAGQLNMRGVFLHVLGDALGSVIVVVNALVFYFSWKGCSEGDFCVNPCFPDPCKAFVEIINSTHASVYEAGPCWVLYLDPTLCVVMVCILLYTTYPLLKESALILLQTVPKQIDIRNLIKELRNVEGVEEVHELHVWQLAGSRIIATAHIKCEDPTSYMEVAKTIKDVFHNHGIHATTIQPEFASVGSKSSVVPCELACRTQCALKQCCGTLPQAPSGKDAEKTPAVSISCLELSNNLEKKPRRTKAENIPAVVIEIKNMPNKQPESSL

SEQ ID NO: 69220 - protein, 69 aa, Homo sapiens
MGTALKLLLGAGAVAYGVRESVFTVEGGHRAIFFNRIGGVQQDTILAEGLHFRSPHHRIVSISQLTTLC

SEQ ID NO: 69221 - protein, 152 aa, Homo sapiens
MGPQRRLSPAGAALLWGFLLQLTAAQEAILHASGNGTTKDYCMLYNPYWTALPSTLENATSISLMNLTSTPLCNLSDIPPVGIKSKAVVVPWGSCHFLEKARIAQKGGAEAMLVVNNSVLFPPSGNRSEFPDVKILIAFISYKDFRDMNQVN

SEQ ID NO: 69222 - protein, 434 aa, Homo sapiens
MISTVNLLVIHLLSHQPVCSLALSLCKSYPPHSVSPTDINTSLPPMSSFHRGSTSSSPYVAASHTPPINGSDSILGTRGNAAGSSQTGDALGKALASIYSPDHTSSSFPSNPSTPVGSPSPLTGTSQWPRPGGQAPSSPSYENSLHSLQSRMEDRLDRLDDAIHVLRNHAVGPSTSLPAGHSDIHSLLGPSHNAPIGSLNSNYGGSSLVASSRSASMVGTHREDSVSLNGNHSVLSSTVTTSSTDLNHKTQENYRGGLQSQSGTVVTTEIKTENKEKDENLHEPPSSDDMKSDDESSQKDIKVSSRGRTSSTNEDEDLNPEQKIEREKERRMANNARERLRVRDINEAFKELGRMCQLHLKSEKPQTKLLILHQAVAVILSLEQQVRERNLNPKAACLKRREEEKVSAVSAEPPTTLPGTHPGLSETTNPMGHM

SEQ ID NO: 69223 - protein, 44 aa, Homo sapiens
MFFAPTVLGLARLRHWVYLLCFSAVFRRELSEYTEGLTSEPLTA

SEQ ID NO: 69224 - protein, 224 aa, Homo sapiens [sequence omitted]

SEQ ID NO: 69225 - protein, 431 aa, Homo sapiens
MACVGFFLLQGAWPLMGGQDKPFLSARPSTVVPRGGHVALQCHYRRGFNNFMLYKEDRSHVPIFHGRIFQESFIMGPVTPAHAGTYRCRGSRPHSLTGWSAPSNPLVIMVTGNHRKPSLLAHPGPLLKSGETVILQCWSDVMFEHFFLHREGISEDPSRLVGQIHDGVSKANFSIGPLMPVLAGTYRCYGSVPHSPYQLSAPSDPLDIVITGLYEKPSLSAQPGPTVQAGENVTLSCSSWSSYDIYHLSREGEAHERRLRAVPKVNRTFQADFPLGPATHGGTYRCFGSFRALPCVWSNSSDPLLVSVTGICRHLHVLIGTSVVIFLFILLLFFLLYRWCSNKKNAAVMDQEPAGDRTVNRQDSDEQDPQEVTYAQLDHCVFIQRKISRPSQRPKTPLTDTSVYTELPNAEPRSKVVSCPRAPQSGLEGVF

SEQ ID NO: 69226 - protein, 138 aa, Homo sapiens [sequence omitted]

SEQ ID NO: 69227 - protein, 449 aa, Homo sapiens
MTLGIYLQLFFLSIVSQPTFINSVLPISAALPSLDQKKRGGHKACCLLTPPPPPLFPPPFFRGGRSPLLSPDMKNLMLELETSQSPCMQGSLGSPGPPGPQGPPGLPGKTGPKGEKGELGRPGRKGRPGPPGVPGMPGPIGWPGPEGPRGEKGDLGMMGLPGSRGPMGSKGYPGSRGEKGSRGEKGDLGPKGEKGFPGFPGMLGQKGEMGPKGEPGIAGHRGPTGRPGKRGKQGQKGDSGVMGPPGKPGPSGQPGRPGPPGPPPAGQLIMGPKGERGFPGPPGRCLCGPTMNVNNPSYGESVYGPSSPRVPVIFVVNNQEELERLNTQNAIAFRRDQRSLYFKDSLGWLPIQLTPFYPVDYTADQHGTCGDGLLQPGEECDDGNSDVGDDCIRCHRAYCGDGHRHEGVEDCDGSDFGYLTCETYLPGSYGDLQCTQYCYIDSTPCRYFT

SEQ ID NO: 69228 - protein, 60 aa, Homo sapiens [sequence omitted]

SEQ ID NO: 69229 - protein, 107 aa, Homo sapiens
MENPSPAAALGKALCALLLATLGAAGQPLGGESICSARALAKYSITFTGKWSQTAFPKQYPLFRPPAQWSSLLGKYSPLLASCSTRRAAAPEPPAQLHGGASQSGAC

SEQ ID NO: 69230 - protein, 33 aa, Homo sapiens
IVLVIVLAGVGVLVWRRRPREQNGAIYLPTPDR

SEQ ID NO: 69231 - protein, 260 aa, Homo sapiens
VPDFIMGNSCYNIVATLLLVLNFERTRSLQDPCSNCPAGTFCDNNRNQICSPCPPNSFSSAGGQRTCDICRQCKGVFRTRKECSSTSNAECDCTPGFHCLGAGCSMCEQDCKQGQELTKKGCKDCCFGTFNDQKRGICRPWTNCSLDGKSVLVNGTKERDVVCGPSPADLSPGASSVTPPAPAREPGHSPQIISFFLALTSTALLFLLFFLTLRFSVVKRGRKKLLYIFKQPFMRPVQTTQEEDGCSCRFPEEEEGGCEL

SEQ ID NO: 69232 - protein, 182 aa, Homo sapiens
RLLSFVVLALFAVTQAEEGARLLASKSLLNRYAVEGRDLTLQYNIYNVGSSAALDVELSDDSFPPEDFGIVSGMLNVKWDRIAPASNVSHTVVLRPLKAGYFNFTSATITYLAQEDGPVVIGSTSAPGQGGILAQREFDRRFSPHFLDWAAFGVMTLPSIGIPLLLWYSSKRKYDTPKTKKN

SEQ ID NO: 69233 - protein, 47 aa, Homo sapiens
IIAPPKRKYSVWVGGSILASLSTFQQMWISKQEYDESGPSIVHRKCF

SEQ ID NO: 69234 - protein, 181 aa, Homo sapiens
RRMWATQGLAVALALSVLPGSRALRPGDCEVCISYLGRFYQDLKDRDVTFSPATIENELIKFCREARGKENRLCYYIGATDDAATKIINEVSKPLAHHIPVEKICEKLKKKDSQICELKYDKQIDLSTVDLKKLRVKELKKILDDWGETCKGCAEKSDYIRKINELMPKYAPKAASARTDL

SEQ ID NO: 69235 - protein, 53 aa, Homo sapiens
LISGLSILALAQLLGLVYMKFVASNQKTIQPPRKAVEEPLNAFKESKGMMNDE

SEQ ID NO: 69236 - protein, 19 aa, Homo sapiens
IVFLAFAFSALFISPDSGF

SEQ ID NO: 69237 - protein, 149 aa, Homo sapiens
LPVLLLLQLLVRPGLQAPMTQTTPLKTSWVNCSNMIDEIITHLKQPPLPLLDFNNLNGEDQDILMENNLRRPNLEAFNRAVKSLQNASAIESILKNLLPCLPLATAAPTRHPIHIKDGDWNEFRRKLTFYLKTLENAQAQQTTLSLAIF

SEQ ID NO: 69238 - protein, 18 aa, Homo sapiens
LVAGLSLMMILRLVLLLL

SEQ ID NO: 69239 - protein, 77 aa, Homo sapiens
IAVLASICVTQAFMMWKFINFQLRRWREHSAFQAPAVKKKPTVTKGRSSKKGTENGVNGTLTSNVADSPRNKKEKSS

SEQ ID NO: 69240 - protein, 28 aa, Homo sapiens
ISLLQIFGIFLARTLISDIEAVKAGHHF

SEQ ID NO: 69241 - protein, 491 aa, Homo sapiens
KFWWHAAWGLCLVPLSLAQIDLNITCRFAGVFHVEKNGRYSISRTEAADLCKAFNSTLPTMAQMEKALSIGFETCRYGFIEGHVVIPRIHPNSICAANNTGVYILTSNTSQYDTYCFNASAPPEEDCTSVTDLPNAFDGPITITIVNRDGTRYVQKGEYRTNPEDIYPSNPTDDDVSSGSSSERSSTSGGYIFYTFSTVHPIPDEDSPWITDSTDRIPATNMDSSHSITLQPTANPNTGLVEDLDRTGPLSMTTQQSNSQSFSTSHEGLEEDKDHPTTSTLTSSNRNDVTGGRRDPNHSEGSTTLLEGYTSHYPHTKESRTFIPVTSAKTGSFGVTAVTVGDSNSNVNRSLSGDQDTFHPSGGSHTTHGSESDGHSHGSQEGGANTTSGPIRTPQIPEWLIILASLLALALILAVCIAVNSRRRCGQKKKLVINSGNGAVEDRKPSGLNGEASKSQEMVHLVNKESSETPDQFMTADETRNLQNVDMKIGV

SEQ ID NO: 69242 - protein, 96 aa, Homo sapiens
IFILFIIVQLFIMKLRKAHVIWKKENEVSEHTLESYRSRSNNEETSSEEKNGQSSHPMRCMNYITKLYSEAKTKRKENVQHSKLEEKHIQVPESIV

SEQ ID NO: 69243 - protein, 144 aa, Homo sapiens
IVLGLVLLSVTVQGKVFERCELARTLKRLGMDGYRGISLANWMCLAKWESGYNTRATNYNAGDRSTDYGIFQINSRYWCNDGKTPGAVNACHLSCSALLQDNIADAVACAKRVVRDPQGIRAWVAWRNRCQNRDVRQYVQGCGV

SEQ ID NO: 69244 - protein, 74 aa, Homo sapiens
MVLPLLIFVLLPKVVNTSDPDMRREMEQSMNMLNSNHELPDVSEFMTRLFSSKSSGKSSSGSSKTGKSGAGKRR

SEQ ID NO: 69245 - protein, 12 aa, Homo sapiens
VLPTLTLGLLVH

SEQ ID NO: 69246 - protein, 28 aa, Homo sapiens
LPILAMLMALCVHCHRLPGSYDSTSSDR

SEQ ID NO: 69247 - protein, 27 aa, Homo sapiens
VLLGATFLIDYMFFEKRGGAGPSAVTS

SEQ ID NO: 69248 - protein, 8 aa, Homo sapiens
KLAAFLLL

SEQ ID NO: 69249 - protein, 151 aa, Homo sapiens
VLLIIVILGVPLIIFTIKANSEACRDGLRAVMECRNVTHLLQQELTEAQKGFQDVEAQAATCNHTVMALMASLDAEKAQGQKKVEELEGEITTLNHKLQDASAEVERLRRENQVLSVRIADKKYYPSSQDSSSAAAPQLLIVLLGLSALLQ

SEQ ID NO: 69250 - protein, 51 aa, Homo sapiens
LGVVTIVLALMYVFREHQRSGSYHVREESTYLPLTSMQPTEAMGEEPSRAE

SEQ ID NO: 69251 - protein, 28 aa, Homo sapiens
LRPPLLALVGLLSLGCGEFCVPRRGLHA

SEQ ID NO: 69252 - protein, 41 aa, Homo sapiens
LLFGLLGVLVAAPDGGFDLSDALPGEYQHHFLKSRQYFMLT

SEQ ID NO: 69253 - protein, 41 aa, Homo sapiens
LLTSLFMLFIFTYGLHMILSLKTMDRFDDHKGPTISLTQIV

SEQ ID NO: 69254 - protein, 19 aa, Homo sapiens
VIVLFFIYHFMQAEEGNPF

SEQ ID NO: 69255 - protein, 550 aa, Homo sapiens
MAHVIAACLYLVCRTEGTPHMLLDLSDLLQVNVYVLGKTFLLLARELCINAPAIDPCLYIPRFAHLLEFGEKNHEVSMTALRLLQRMKRDWMHTGRRPSGLCGAALLVAARMHDFRRTVKEVISVVKVCESTLRKRLTEFEDTPTSQLTIDEFMKIDLEEECDPPSYTAGQRKLRMKQLEQVLSKKLEEVEGEISSYQDAIEIELENSRPKAKGGLASLAKDGSTEDTASSLCGEEDTEDEELEAAASHLNKDLYRELLGGAPGSSEAAGSPEWGGRPPALGSLLDPLPTAASLGISDSIRECISSQSSDPKDASGDGELDLSGIDDLEIDRYILNESEARVKAELWMRENAEYLREQREKEARIAKEKELGIYKEHKPKKSCKRREPIQASTAREAIEKMLEQKKISSKINYSVLRGLSSAGGGSPHREDAQPEHSASARKLSRRRTPASRSGADPVTSVGKRLRPLVSTQPAKKVATGEALLPSSPTLGAEPARPQAVLVESGPVSYHADEEADEEEPDEEDGEPCVSALQMMGSNDYGCDGDEDDGY

SEQ ID NO: 69256 - protein, 510 aa, Homo sapiens [sequence omitted]

SEQ ID NO: 69257 - protein, 664 aa, Homo sapiens
MFSIPRLAIVCGLVVYADGPLNLDRKVEDMSELFRPFHTLLRKIRDLLQTLTEEELHTLERNLCISQDVEFPIRADVQGPAALAPALSAPLPPEGPLSAKAKDPDAELACSMQYDDQELEQLSRMVHRAGDEMSSLLSPPIACQSPAHRPGAEGSPGGEASPGRPRLRSGSDEEERVFFMDDVEGTAEALARPESPAGPFGWAGSTWADPQEKGQGGPGGAAGISLPASEKEEDLSNNNLEAEGTDGASLAGTSSCSCLDSRLHLDGWEVGADDAETAEMIAHRTGGMKLSATVIFNPKSPTSLDSAVATQEAASEPVAEGMDGGPHKLSTGATNCLLHSCVCCGSCGDSREDVVERLREKCSPGGVIGASYAAGLAKASDRAPERQEEAPPPSEDASNGREPKAPTSDKCLPHTSGSQVDTASGLQGEAGVAGQQEPEARELHAGSPSAHEAPQALSGSSSSTAGSCSSDKMGPEAAPAATHAAPQATREKIRSRFHGSHDLIHRLFVCISGVADQLQTNYASDLRSILKTLFEVMATKPETDDKEKLRKVTQTLRSAALEDCALCQETLSSSELAAKTRDGDFEDPPEWVPDEACGFCTACKAPFTVIRRKHHCRSCGKIFCSRCSSHSAPLPRYGQVKPVRVCTHCYMFHVTPFYSDKAGL

SEQ ID NO: 69258 - protein, 16 aa, Homo sapiens
IFSSVLQTSLLFLLME

SEQ ID NO: 69259 - protein, 364 aa, Homo sapiens
LPRLLLLVLLCLPAVWGDCGLPPDVPNAQPALEGRTSFPEDTVITYKCEESFVKIPGEKDSVICLKGSQWSDIEEFCNRSCEVPTRLNSASLKQPYITQNYFPVGTVVEYECRPGYRREPSLSPKLTCLQNLKWSTAVEFCKKKSCPNPGEIRNGQIDVPGGILFGATISFSCNTGYKLFGSTSSFCLISGSSVQWSDPLPECREIYCPAPPQIDNGIIQGERDHYGYRQSVTYACNKGFTMIGEHSIYCTVNNDEGEWSGPPPECRGKSLTSKVPPTVQKPTTVNVPTTEVSPTSQKTTTKTTTPNAQATRSTPVSRTTKHFHETTPNKGSGTTSGTTRLLSGHTCFTLTGLLGTLVTMGLLT

SEQ ID NO: 69260 - protein, 57 aa, Homo sapiens
LLFLLFFLTLRFSVVKRGRKKLLYIFKQPFMRPVQTTQEEDGCSCRFPEEEEGGCEL

SEQ ID NO: 69261 - protein, 14 aa, Homo sapiens
ITILFACLINLETL

SEQ ID NO: 69262 - protein, 48 aa, Homo sapiens
MIALTVVGCIFMVIEGKKAAQRHETLTSLNLEKKARLKEEAAMKAKTE

SEQ ID NO: 69263 - protein, 14 aa, Homo sapiens
MIHVLLILCFTGHL

SEQ ID NO: 69264 - protein, 10 aa, Homo sapiens
LSRLNMLWLL

SEQ ID NO: 69265 - protein, 96 aa, Homo sapiens
KADIFAFGLTLWEMMTLSIPHINLSNDDDDEDKTFDESDFDDEAYYAALGTRPPINMEELDESYQKVIELFSVCTNEDPKDRPSAAHIVEALETDV

SEQ ID NO: 69266 - protein, 45 aa, Homo sapiens
VSPLLGSIAGVFVYQLMIGCHLEQPPPSNEEENVKLAHVKHKEQI

SEQ ID NO: 69267 - protein, 85 aa, Homo sapiens
LALALILAVCIAVNSRRRCGQKKKLVINSGNGAVEDRKPSGLNGEASKSQEMVHLVNKESSETPDQFMTADETRNLQNVDMKIGV

SEQ ID NO: 69268 - protein, 35 aa, Homo sapiens
IFAGLAFIVGLLILLSRRFRCGGNKKRRQINEDEP

SEQ ID NO: 69269 - protein, 22 aa, Homo sapiens
LFSSVLIALLLPTAAWGFWPRG

SEQ ID NO: 69270 - protein, 10 aa, Homo sapiens
KMAVFALVLV

SEQ ID NO: 69271 - protein, 17 aa, Homo sapiens
MMMMNKLVLAQFFFSCL

SEQ ID NO: 69272 - protein, 14 aa, Homo sapiens
LGVLPTLTLGLLVH

SEQ ID NO: 69273 - protein, 59 aa, Homo sapiens
LPLTLLVLLAGYNHDKLIPLLLQLTSRLQGVRALGQAASDNSGPEDAKRQAKKQKTRRT

SEQ ID NO: 69274 - protein, 69 aa, Homo sapiens
LLLLLIFIVLYKVGFFKRNLKEKMEAGRGVPNGIPAEDSEQLASGQEAGDPGCLKPLHEKDSESGGGKD

SEQ ID NO: 69275 - protein, 408 aa, Homo sapiens
LLLPVCLEMATLLLLLGVLVVSPDALGSTTAVQTPTSGEPLVSTSEPLSSKMYTTSITSDPKADSTGDQTSALPPSTSINEGSPLWTSIGASTGSPLPEPTTYQEVSIKMSSVPQETPHATSHPAVPITANSLGSHTVTGGTITTNSPETSSRTSGAPVTTAASSLETSRGTSGPPLTMATVSLETSKGTSGPPVTMATDSLETSTGTTGPPVTMTTGSLEPSSGASGPQVSSVKLSTMMSPTTSTNASTVPFRNPDENSRGMLPVAVLVALLAVIVLVALLLLWRRRQKRRTGALVLSRGGKRNGVVDAWAGPAQVPEEGAVTVTVGGSGGDKGSGFPDGEGSSRRPTLTTFFGRRKSRQGSLAMEELKSGSGPSLKGEEEPLVASEDGAVDAPAPDEPEGGDGAAP

SEQ ID NO: 69276 - protein, 23 aa, Homo sapiens
ILFLIGLMCGRITKRVTRELKDR

SEQ ID NO: 69277 - protein, 148 aa, Homo sapiens
KLDDLVNWARRSSLWPMTFGLACCAVEMMHMAAPRYDMDRFGVVFRASPRQSDVMIVAGTLTNKMAPALRKVYDQMPEPRYVVSMGSCANGGGYYHYSYSVVRGCDRIVPVDIYIPGCPPTAEALLYGILQLQRKIKRERRLQIWYRR

SEQ ID NO: 69278 - protein, 98 aa, Homo sapiens
MLATFHFSWSTFLLLNQLFQIAFLGLTSHERISLQKQSKHMKQTLSLRKTPYNLGFMQNLADFFQCGCFGLVKPCVVDWTSQYTMVFHPAREKVLRSV

SEQ ID NO: 69279 - protein, 223 aa, Homo sapiens
MNFFNQLAFCDFLFLFVGLNWMEGDPDKLSDCDDSIALSFWKAIEKEATSWMVKAETFHFVFGSFKLERSAPKPRLEHQKKVRKMEENGNMPTKLQKLDLSSYPEATEKNVERILGLLQTYFRKYPDTPVSYFEFVIDPNSFSRTVENIFYVSFIVRDGFARIRLDEDRLPILEPMNVNQMGEGNDSSCHGRKQGVISLTLQEWKNIVAAFEISEAMITYSSY

SEQ ID NO: 69280 - protein, 135 aa, Homo sapiens
MWSLGCMLASMIFRREPFFHGQDNYDQLVRIAKVLGTEELYGYLKKYHIDLDPHFNDILGQHSRKRWENFIHSENRHLVSPEALDLLDKLLRYDHQQRLTAKEAMEHPYFYPVVKEQSQPCADNAVLSSGLTAAR

SEQ ID NO: 69281 - protein, 1213 aa, Homo sapiens
MQLNFGILPLGFYFLSAATTSMQSLVAFLPETAFKFKALKKVAQLAVINSLEKAFWNWVENYPDEFTKLYQIPQTDMAECAEKLFDLVDGFAESTKRKAAVWPLQIILLILCPEIIQDISKDVVDENNMNKKLFLDSLRKALAGHGGSRQLTESAAIACVKLCKASTYINWEDNSVIFLLVQSMVVDLKNLLFNPSKPFSRGSQPADVDLMIDCLVSCFRISPHNNQHFKICLAQNSPSTFHYVLVNSLHRIITNSALDWWPKIDAVYCHSVELRNMFGETLHKAVQGCGAHPAIRMAPSLTFKEKVTSLKFKEKPTDLETRSYKYLLLSMVKLIHADPKLLLCNPRKQGPETQGSTAELITGLVQLVPQSHMPEIAQEAMEALLVLHQLDSIDLWNPDAPVETFWEISSQMLFYICKKLTSHQMLSSTEILKWLREILICRNKFLLKNKQADRSSCHFLLFYGVGCDIPSSGNTSQMSMDHEELLRTPGASLRKGKGNSSMDSAAGCSGTPPICRQAQTKLEVALYMFLWNPDTEAVLVAMSCFRHLCEEADIRCGVDEVSVHNLLPNYNTFMEFASVSNMMSTGRAALQKRVMALLRRIEHPTAGNTEAWEDTHAKWEQATKLILNYPKAKMEDGQAAESLHKTIVKRRMSHVSGGGSIDLSDTDSLQEWINMTGFLCALGGVCLQQRSNSGLATYSPPMGPVSERKGSMISVMSSEGNADTPVSKFMDRLLSLMVCNHEKVGLQIRTNVKDLVGLELSPALYPMLFNKLKNTISKFFDSQGQVLLTDTNTQFVEQTIAIMKNLLDNHTEGSSEHLGQASIETMMLNLVRYVRVLGNMVHAIQIKTKLCQLVEVMMARRDDLSFCQEMKFRNKMVEYLTDWVMGTSNQAADDDVKCLTRDLDQASMEAVVSLLAGLPLQPEEGDGVELMEAKSQLFLKYFTLFMNLLNDCSEVEDESAQTGGRKRGMSRRLASLRHCTVLAMSNLLNANVDSGLMHSIGLGYHKDLQTRATFMEVLTKILQQGTEFDTLAETVLADRFERLVELVTMMGDQGELPIAMALANVVPCSQWDELARVLVTLFDSRHLLYQLLWNMFSKEVELADSMQTLFRGNSLASKIMTFCFKVYGATYLQKLLDPLLRIVITSSDWQHVSFEVDPTRLEPSESLEENQRNLLQMTEKFFHAIISSSSEFPPQLRSVCHCLYQSHRSHLLF

SEQ ID NO: 69282 - protein, 64 aa, Homo sapiens
MDYHYIAKSCLLCSLVPCCLPFWPFQNINAAKSSFLPEDEKRELLDLLYKAYGMPPSASAGQNL

SEQ ID NO: 69283 - protein, 158 aa, Homo sapiens [sequence omitted]

SEQ ID NO: 69284 - protein, 339 aa, Homo sapiens [sequence omitted]

SEQ ID NO: 69285 - protein, 209 aa, Homo sapiens
MLLVTLAAVSLTLTLVLVFERHQKKANTNTDLRLAAANGALLRHRVLLGVTDTVEGCQSVIQLWFVYFDLENCVQFLSDHVQEMKTSQESLLRSRLSQLCVVMETGVSPATAEGPENLEDAPLLPGNSCPNERPLMQTELHQLVPEAEPEEMARQLLAVFGGYYIRLLVTSQLPQAMGTRHTNSPRIPCPCQLIEAYILGTGCCPFLAR

SEQ ID NO: 69286 - protein, 152 aa, Homo sapiens
VWTPIPVLTWFFPIIGHMGICTSTGVIRDFAGPYFVSEDNMAFGKPAKYWKLDPAQVYASGPNAWDTAVHDASEEYKHRMHNLCCDNCHSHVALALNLMRYNNSTNWNMVTLCFFCLLYGKYVSVGAFVKTWLPFILLLGIILTVSLVFNLR

SEQ ID NO: 69287 - protein, 251 aa, Homo sapiens
RTMGELMAFLLPLIIVLMVKHSDSRTHSLRYFRLGVSDPIHGVPEFISVGYVDSHPITTYDSVTRQKEPRAPWMAENLAPDHWERYTQLLRGWQQMFKVELKRLQRHYNHSGSHTYQRMIGCELLEDGSTTGFLQYAYDGQDFLIFNKDTLSWLAVDNVAHTIKQAWEANQHELLYQKNWLEEECIAWLKRFLEYGKDTLQRTESETIPLVMKAVSGSIVLVIVLAGVGVLVWRRRPREQNGAIYLPTPDR

SEQ ID NO: 69288 - protein, 46 aa, Homo sapiens
VGLLLLLWLSLPVRLPSFVVSQRCAGLLLAALRIQGVGCQVQDLQL

SEQ ID NO: 69289 - protein, 26 aa, Homo sapiens
KATSHKIPMVLLLWLFFKTRPNTKTD

SEQ ID NO: 69290 - protein, 53 aa, Homo sapiens
IWTSAAFIFSYITAVTLHHIDPALPYISDTGTVAPEKCLFGAMLNIAAVLCQK

SEQ ID NO: 69291 - protein, 106 aa, Homo sapiens
LLVIWCGVSALSMLTCSSVLHSGNFGTDLEQKLHWNPEDKGYVLHMITTAAEWSMSFSFFGFFLTYIRDFQKISLRVEANLHGLTLYDTAPCPINNERTRLLSRDI

SEQ ID NO: 69292 - protein, 10 aa, Homo sapiens
LGLFLVLNYF

SEQ ID NO: 69293 - protein, 62 aa, Homo sapiens
LVIITLLFICCHCCWSPPGKRGQQPEKNKKKKKKKKKKDEEDLWISAQPKLLQMEKRPSLPV

SEQ ID NO: 69294 - protein, 414 aa, Homo sapiens
VWLGIMLPVLGIKSLSPFAITYLDRLLLMHPNLTKGFGMIGPKDFFPLLDFAYMPNNSLTPSLQEQLCQLYPRLKVLAFGAKPDSTLHTYFPSFLSRATPSCPPEMKKELLSSLTECLTVDPLSASVWRQLYPKHLSQSSLLLEHLLSSWEQIPKKVQKSLQETIQSLKLTNQELLRKGSSNNQDVVTCDMACKGLLQQVQGPRLPWTRLLLLLLVFAVGFLCHDLRSHSSFQASLTGRLLRSSGFLPASQQACAKLYSYSLQGYSWLGETLPLWGSHLLTVVRPSLQLAWAHTNATVSFLSAHCASHLAWFGDSLTSLSQRLQIQLPDSVNQLLRYLRELPLLFHQNVLLPLWHLLLEALAWAQEHCHEACRGEVTWDCMKTQLSEAVHWTWLCLQDITVAFLDWALALISQQ

SEQ ID NO: 69295 - protein, 765 aa, Homo sapiens
KTPWKVLLGLLGAAALVTIITVPVVLLNKGTDDATADSRKTYTLTDYLKNTYRLKLYSLRWISDHEYLYKQENNILVFNAEYGNSSVFLENSTFDEFGHSINDYSISPDGQFILLEYNYVKQWRHSYTASYDIYDLNKRQLITEERIPNNTQWVTWSPVGHKLAYVWNNDIYVKIEPNLPSYRITWTGKEDIIYNGITDWVYEEEVFSAYSALWWSPNGTFLAYAQFNDTEVPLIEYSFYSDESLQYPKTVRVPYPKAGAVNPTVKFFVVNTDSLSSVTNATSIQITAPASMLIGDHYLCDVTWATQERISLQWLRRIQNYSVMDICDYDESSGRWNCLVARQHIEMSTTGWVGRFRPSEPHFTLDGNSFYKIISNEEGYRHICYFQIDKKDCTFITKGTWEVIGIEALTSDYLYYISNEYKGMPGGRNLYKIQLSDYTKVTCLSCELNPERCQYYSVSFSKEAKYYQLRCSGPGLPLYTLHSSVNDKGLRVLEDNSALDKMLQNVQMPSKKLDFIILNETKFWYQMILPPHFDKSKKYPLLLDVYAGPCSQKADTVFRLNWATYLASTENIIVASFDGRGSGYQGDKIMHAINRRLGTFEVEDQIEAARQFSKMGFVDNKRIAIWGWSYGGYVTSMVLGSGSGVFKCGIAVAPVSRWEYYDSVYTERYMGLPTPEDNLDHYRNSTVMSRAENFKQVEYLLIHGTADDNVHFQQSAQISKALVDVGVDFQAMWYTDEDHGIASSTAHQHIYTHMSHFIKQCFSLP

SEQ ID NO: 69296 - protein, 31 aa, Homo sapiens
KNKAAAWSLFTMFIAKSFRNKQFPCTVSCSL

SEQ ID NO: 69297 - protein, 15 aa, Homo sapiens
LWSTSHTSFLSLLCV

SEQ ID NO: 69298 - protein, 48 aa, Homo sapiens
KKNYIFLIFFFKSLPLVALYLRLHFLQETLFPTSACQVSTSRSVWFSC

SEQ ID NO: 69299 - protein, 15 aa, Homo sapiens
ILLLVFIVVKCFTSE

SEQ ID NO: 69300 - protein, 89 aa, Homo sapiens
IALTVAFFLFEFLAATQDIAVDGWALTMLSRENVGYASTCNSVGQTAGYFLGNVLFLALESADFCNKYLRFQPQPRGIVTLSGLVKQLF

SEQ ID NO: 69301 - protein, 159 aa, Homo sapiens
KQLQEMALGVPISVYLLFNAMTALTEEAAVTVTPPITAQQGNWTVNKTEADNIEGPIALKFSHLCLEDHNSYCINGACAFHHELEKAICRCFTGYTGERCEHLTLTSYAVDSYEKYIAIGIGVGLLLSGFLVIFYCYIRKRCLKLKSPYNVCSGERRPL

SEQ ID NO: 69302 - protein, 30 aa, Homo sapiens
LGAGSLLLVITYPLMKRISYWPQLALGQKR

SEQ ID NO: 69303 - protein, 254 aa, Homo sapiens
LPWWGSILLSTVALRGAVTLPLAAYQHYILAKVENLQPEIKTIARHLNQEVAVRANQLGWSKRDARLTYLKNMRRLISELYVRDNCHPFKATVLVWIQLPMWIFMSFALRNLSTGAAHSEGFSVQEQLATGGILWFPDLTAPDSTWILPISVGVINLLIVEICALQKIGMSRFQTYITYFVRAMSVLMIPIAATVPSSIVLYWLCSSFVGLSQNLLLRSPGFRQLCRIPSTKSDSETPYKDIFAAFNTKFISRK

SEQ ID NO: 69304 - protein, 11 aa, Homo sapiens
KATICLLPVLL

SEQ ID NO: 69305 - protein, 15 aa, Homo sapiens
RILLVRGLCMIMGVD

SEQ ID NO: 69306 - protein, 52 aa, Homo sapiens
IQGALVAILVAVYVSDFFKERTSFKERKEEDSHTTLHETPTTGNHYPSNHQP

SEQ ID NO: 69307 - protein, 185 aa, Homo sapiens
LPLLLLLLGAWAIPGGLGDRAPLTATAPQLDDEEMYSAHMPAHLRCDACRAVAYQMWQNLAKAETKLHTSNSGGRRELSELVYTDVLDRSCSRNWQDYGVREVDQVKRLTGPGLSEGPEPSISVMVTGGPWPTRLSRTCLHYLGEFGEDQIYEAHQQGRGALEALLCGGPQGACSEKVSATREEL

SEQ ID NO: 69308 - protein, 938 aa, Homo sapiens
LPLKWSLATMSFLLSSLLALLTVSTPSWCQSTEASPKRSDGTPFPWNKIRLPEYVIPVHYDLLIHANLTTLTFWGTTKVEITASQPTSTIILHSHHLQISRATLRKGAGERLSEEPLQVLEHPRQEQIALLAPEPLLVGLPYTVVIHYAGNLSETFHGFYKSTYRTKEGELRILASTQFEPTAARMAFPCFDEPAFKASFSIKIRREPRHLAISNMPLVKSVTVAEGLIEDHFDVTVKMSTYLVAFIISDFESVSKITKSGVKVSVYAVPDKINQADYALDAAVTLLEFYEDYFSIPYPLPKQDLAAIPDFQSGAMENWGLTTYRESALLFDAEKSSASSKLGITMTVAHELAHQWFGNLVTMEWWNDLWLNEGFAKFMEFVSVSVTHPELKVGDYFFGKCFDAMEVDALNSSHPVSTPVENPAQIREMFDDVSYDKGACILNMLREYLSADAFKSGIVQYLQKHSYKNTKNEDLWDSMASICPTDGVKGMDGFCSRSQHSSSSSHWHQEGVDVKTMMNTWTLQKGFPLITITVRGRNVHMKQEHYMKGSDGAPDTGYLWHVPLTFITSKSDMVHRFLLKTKTDVLILPEEVEWIKFNVGMNGYYIVHYEDDGWDSLTGLLKGTHTAVSSNDRASLINNAFQLVSIGKLSIEKALDLSLYLKHETEIMPVFQGLNELIPMYKLMEKRDMNEVETQFKAFLIRLLRDLIDKQTWTDEGSVSERMLRSQLLLLACVHNYQPCVQRAEGYFRKWKESNGNLSLPVDVTLAVFAVGAQSTEGWDFLYSKYQFSLSSTEKSQIEFALCRTQNKEKLQWLLDESFKGDKIKTQEFPQILTLIGRNPVGYPLAWQFLRKNWNKLVQKFELGSSSIAHMVMGTTNQFSTRTRLEEVKGFFSSLKENGSQLRCVQQTIETIEENIGWMDKNFDKIRVWLQSEKLERM

SEQ ID NO: 69309 - protein, 42 aa, Homo sapiens
KSMYFYLHIISLLIILFLPMKPQAHTQRRPQTLNSINKRKTD

SEQ ID NO: 69310 - protein, 278 aa, Homo sapiens
LLLLLVFPATVLFRGGPRGLLAVAQDLTEDEETVEDSIIEDEDDEAEVEEDEPTDLVEDKEEEDVSGEPEASPSADTTILFVKGEDFPANNIVKFLVGFTNKGTEDFIVESLDASFRYPQDYQFYIQNFTALPLNTVVPPQRQATFEYSFIPAEPMGGRPFGLVINLNYKDLNGNVFQDAVFNQTVTVIEREDGLDGETIFMYMFLAGLGLLVIVGLHQLLESRKRKRPIQKVEMGTSSQNDVDMSWIPQETLNQINKASPRRLPRKRAQKRSVGSDE

SEQ ID NO: 69311 - protein, 19 aa, Homo sapiens
VNTWIYGTLLGCLWVTIKA

SEQ ID NO: 69312 - protein, 138 aa, Homo sapiens
RTAILSRMKIFLPVLLAALLGVERASSLMCFSCLNQKSNLYCLKPTICSDQDNYCVTVSASAGIGNLVTFGHSLSKTCSPACPIPEGVNVGVASMGISCCQSFLCNFSAADGGLRASVTLLGAGLLLSLLPALLRFGP

SEQ ID NO: 69313 - protein, 78 aa, Homo sapiens
LIVILVSFGLFMYAKRNKRRIMRIFSVPPTEETLSEPNFYDTISKIRLRQQLEMYSISRKYDYQQPQNQADSVQLSLE

SEQ ID NO: 69314 - protein, 37 aa, Homo sapiens
MSTKLVVLVLFLLAEWRLVFSNPVWWSPLLQSTLQRK

SEQ ID NO: 69315 - protein, 52 aa, Homo sapiens
ILLCILVVASNIYSAMLVSPTNSVPTPNQTPWPAQPQRTFRDISEDLKSSVG

SEQ ID NO: 69316 - protein, 54 aa, Homo sapiens
VGLVGFCLVFATPLCCALFPQKSSIHISNLEPELRAQIHEQNPSVEVVYYNKGL

SEQ ID NO: 69317 - protein, 34 aa, Homo sapiens
KRRFTSVLVVSSLSPLCVLLWRELTGIQAHPCSP

SEQ ID NO: 69318 - protein, 490 aa, Homo sapiens
LQPLATLYLLGMLVASCLGRLSWYDPDFQARLTRSNSKCQGQLEVYLKDGWHMVCSQSWGRSSKQWEDPSQASKVCQRLNCGVPLSLGPFLVTYTPQSSIICYGQLGSFSNCSHSRNDMCHSLGLTCLEPQKTTPPTTRPPPTTTPEPTAPPRLQLVAQSGGQHCAGVVEFYSGSLGGTISYEAQDKTQDLENFLCNNLQCGSFLKHLPETEAGRAQDPGEPREHQPLPIQWKIQNSSCTSLEHCFRKIKPQKSGRVLALLCSGFQPKVQSRLVGGSSICEGTVEVRQGAQWAALCDSSSARSSLRWEEVCREQQCGSVNSYRVLDAGDPTSRGLFCPHQKLSQCHELWERNSYCKKVFVTCQDPNPAGLAAGTVASIILALVLLVVLLVVCGPLAYKKLVKKFRQKKQRQWIGPTGMNQNMSFHRNHTATVRSHAENPTASHVDNEYSQPPRNSHLSAYPALEGALHRSSMQPDNSSDSDYDLHGAQRL

SEQ ID NO: 69319 - protein, 148 aa, Homo sapiens
ISLLFYGLYYGVLERDFAEMCADYMASTIGFYSESGMPTKHLSDSVCAVCGQQIFVDVSEEGIIENTYRLSCNHVFHEFCIRGWCIVGKKQTCPYCKEKVDLKRMFSNPWERPHVMYGQLLDWLRYLVAWQPVIIGVVQGINYILGLE

SEQ ID NO: 69320 - protein, 30 aa, Homo sapiens
KVSGFFLFGSPLGLVLALRKTVMPALEGES

SEQ ID NO: 69321 - protein, 20 aa, Homo sapiens
VVVLLIVVFVYVATRPTITE

SEQ ID NO: 69322 - protein, 18 aa, Homo sapiens
IPWWWSSSLWWCFLRAHH

SEQ ID NO: 69323 - protein, 32 aa, Homo sapiens
ILKTMNVLWAFTYWVQMLEKLHKALQLRSNVD

SEQ ID NO: 69324 - protein, 54 aa, Homo sapiens
REKGIIYNMILSHLLHLCAHTCEGLGPASTTALPQTQLSTSRQDGITVTGGPEV

SEQ ID NO: 69325 - protein, 298 aa, Homo sapiens
IAPKSTSVFAVASVGHGVFLPLVILCTLLGDGLASVCPLPPEPENGGYICHPRPCRDPLTAGSVIEYLCAEGYMLKGDYKYLTCKNGEWKPAMEISCRLNEDKDTHTSLGVPTLSIVASTASSVALILLLVVLFVLLQPKLKSFHHSRRDQGVSGDQVSIMVDGVQVALPSYEEAVYGSSGHCVPPADPRVQIVLSEGSGPSGRSVPREQQLPDQGACSSAGGEDEAPGQSGLCEAWGSRASETVMVHQATTSSWVAGSGNRQLAHKETADSENSDIQSLLSLTSEEYTDDIPLLKEA

SEQ ID NO: 69326 - protein, 165 aa, Homo sapiens
IATHPTAFPATIMFAMKCLSLLKFLMDLGCDGEPCFSCLYGNGPHPPAPQPSSRFNDAPAADKEPSVVQFCEFVSAPEVSRWAGPIIDVLLDYVGNVQLCSRLKEHIDSFEDWAVIKEKAEPPRPLAHLCRLRVRKAIGKYRIKLLDTLPLPGRLIRYLKYENTQ

SEQ ID NO: 69327 - protein, 76 aa, Homo sapiens
ITFSFFSIFSWGVLASLTYQRYKAGVDDFIQNYVDPSPDPNTAYASYPGASVDNYQQPPFTQNAETTEGYQPPPVY

SEQ ID NO: 69328 - protein, 15 aa, Homo sapiens
IKTLISSFFFFLKVT

SEQ ID NO: 69329 - protein, 745 aa, Homo sapiens
LRVLILLLSWAAGMGGQYGNPLNKYIRHYEGLSYNVDSLHQKHQRAKRAVSHEDQFLRLDFHAHGRHFNLRMKRDTSLFSDEFKVETSNKVLDYDTSHIYTGHIYGEEGSFSHGSVIDGRFEGFIQTRGGTFYVEPAERYIKDRTLPFHSVIYHEDDINYPHKYGPQGGCADHSVFERMRKYQMTGVEEVTQIPQEEHAANGPELLRKKRTTSAEKNTCQLYIQTDHLFFKYYGTREAVIAQISSHVKAIDTIYQTTDFSGIRNISFMVKRIRINTTADEKDPTNPFRFPNIGVEKFLELNSEQNHDDYCLAYVFTDRDFDDGVLGLAWVGAPSGSSGGICEKSKLYSDGKKKSLNTGIITVQNYGSHVPPKVSHITFAHEVGHNFGSPHDSGTECTPGESKNLGQKENGNYIMYARATSGDKLNNNKFSLCSIRNISQVLEKKRNNCFVESGQPICGNGMVEQGEECDCGYSDQCKDECCFDANQPEGRKCKLKPGKQCSPSQGPCCTAQCAFKSKSEKCRDDSDCAREGICNGFTALCPASDPKPNFTDCNRHTQVCINGQCAGSICEKYGLEECTCASSDGKDDKELCHVCCMKKMDPSTCASTGSVQWSRHFSGRTITLQPGSPCNDFRGYCDVFMRCRLVDADGPLARLKKAIFSPELYENIAEWIVAHWWAVLLMGIALIMLMAGFIKICSVHTPSSNPKLPPPKPLPGTLKRRRPPQPIQQPQRQRPRESYQMGHMRR

SEQ ID NO: 69330 - protein, 16 aa, Homo sapiens
VKSENRMETVLSMLLL

SEQ ID NO: 69331 - protein, 30 aa, Homo sapiens
ILFYMIFSICHRSPPLRHAARKQGKGPPSE

SEQ ID NO: 69332 - protein, 26 aa, Homo sapiens
IIFTSVGTLVIFLDATYHLPPPDPFP

SEQ ID NO: 69333 - protein, 20 aa, Homo sapiens
IVCFIFISMILFIRIMPKLK

SEQ ID NO: 69334 - protein, 112 aa, Homo sapiens
KRCDLWSLGVILYILLSGYPPFVGRCGSDCGWDRGEACPACQNMLFESIQEGKYEFPDKDWAHISCAAKDLISKLLVRDAKQRLSAAQVLQHPWVQGCAPENTLPTPMVLQR

SEQ ID NO: 69335 - protein, 621 aa, Homo sapiens
LLALTIIASTWALTPTHYLTKHDVERLKASLDRPFTNLESAFYSIVGLSSLGAQVPDAKKACTYIRSNLDPSNVDSLFYAAQASQALSGCEISISNETKDLLLAAVSEDSSVTQIYHAVAALSGFGLPLASQEALSALTARLSKEETVLATVQALQTASHLSQQADLRSIVEEIEDLVARLDELGGVYLQFEEGLETTALFVAATYKLMDHVGTEPSIKEDQVIQLMNAIFSKKNFESLSEAFSVASAAAVLSHNRYHVPVVVVPEGSASDTHEQAILRLQVTNVLSQPLTQATVKLEHAKSVASRATVLQKTSFTPVGDVFELNFMNVKFSSGYYDFLVEVEGDNRYIANTVELRVKISTEVGITNVDLSTVDKDQSIAPKTTRVTYPAKAKGTFIADSHQNFALFFQLVDVNTGAELTPHQTFVRLHNQKTGQEVVFVAEPDNKNVYKFELDTSERKIEFDSASGTYTLYLIIGDATLKNPILWNVADVVIKFPEEEAPSTVLSQNLFTPKQEIQHLFREPEKRPPTVVSNTFTALILSPLLLLFALWIRIGANVSNFTFAPSTIIFHLGHAAMLGLMYVYWTQLNMFQTLKYLAILGSVTFLAGNRMLAQQAVKRTAH

SEQ ID NO: 69336 - protein, 310 aa, Homo sapiens
VWYLVAAALLVGFILFLTRSRGRAASAGQEPLHNEELAGAGRVAQPGPLEPEEPRAGGRPRRRRDLGSRLQAQRRAQRVAWAEADENEEEAVILAQEEEGVEKPAETHLSGKIGAKKLRKLEEKQARKAQREAEEAEREERKRLESQREAEWKKEEERLRLEEEQKEEEERKAREEQAQREHEEYLKLKEAFVVEEEGVGETMTEEQSQSFLTEFINYIKQSKVVLLEDLASQVGLRTQDTINRIQDLLAEGTITGVIDDRGKFIYITPEELAAVANFIRQRGRVSIAELAQASNSLIAWGRESPAQAPA

SEQ ID NO: 69337 - protein, 34 aa, Homo sapiens
LIGFEFTVLVALELALYLPENQVLPHYRRLTQQF

SEQ ID NO: 69338 - protein, 160 aa, Homo sapiens
MRLLSFVVLALFAVTQAEEGARLLASKSLLNRYAVEGRDLTLQYNIYNVGSSAALDVELSDDSFPPEDFGIVSGMLNVKWDRIAPASNVSHTVVLRPLKAGYFNFTSATITYLAQEDGPVVIGSTSAPGQGGILAQREFDRRFSPHFVSFLVFSLISSLV

SEQ ID NO: 69339 - protein, 189 aa, Homo sapiens
MLLWLLLLILTPGREQSGVAPKAVLLLNPPWSTAFKGEKVALICSSISHSLAQGDTYWYHDEKLLKIKHDKIQITEPGNYQCKTRGSSLSDAVHVEFSPDWLILQALHPVFEGDNVILRCQGKDNKNTHQKVYYKDGKQLPNSYNLEKITVNSVSRDNSKYHCTAYRKFYILDIEVTSKPLNIQVQGNG

SEQ ID NO: 69340 - protein, 238 aa, Homo sapiens
MQLLLLALVTAAGSAQPRSARARTDLLNVCMNAKHHKTQPSPEDELYGQCSPWKKNACCTASTSQELHKDTSRLYNFNWDHCGKMEPTCKRHFIQDSCLYECSPNLGPWIRQVNQSWRKERILNVPLCKEDCERWWEDCRTSYTCKSNWHKGWNWTSGINECPAGALCSTFESYFPTPAALCEGLWSHSFKVSNYSRGSGRCIQMWFDSAQGNPNEEVAKFYAAAMNAGAPSRGIIDS

SEQ ID NO: 69341 - protein, 25 aa, Homo sapiens
MTFSLAAMSCWLSLVPSSLEASSWF

SEQ ID NO: 69342 - protein, 280 aa, Homo sapiens
MGTALKLLLGAGAVAYGVRESVFTVEGGHRAIFFNRIGGVQQDTILAEGLHFRIPWFQYPIIYDIRARPRKISSPTGSKDLQMVNISLRVLSRPNAQELPSMYQRLGLDYEERVLPSIVNEVLKSVVAKFNASQLITQRAQVSLLIRRELTERAKDFSLILDDVAITELSFSREYTAAVEAKQVAQQEAQRAQFLVEKAKQEQRQKIVQAEGEAEAAKMLGEALSKNPGYIKLRKIRAAQNISKTIATSQNRIYLTADNLVLNLQDESFTRSDSLIKGKK

SEQ ID NO: 69343 - protein, 228 aa, Homo sapiens
MVALPMVLVLLLVLSRGESELDAKIPSTGDATEWRNPHLSMLGSCQPAPSCQKCILSHPSCAWCKQLNFTASGEAEARRCARREELLARGCPLEELEEPRGQQEVLQDQPLSQGARGEGATQLAPQRVRVTLRPGEPQQLQVRFLRAEGYPVDLYYLMDLSYSMKDDLERVRQLGHALLVRLQEVTHSVRIGEPSAASRPVSPCLFNHCPSLCQHPGLTRAPTCPPSC

SEQ ID NO: 69344 - protein, 622 aa, Homo sapiens
MFQNSDKLLSHMAAQCLALLLYFQLREKITLSNSWIAFCQKNLSEYSESNKAIYCLWTLTAIIKEIFKDSCSQKTEILKQFLTHFDTIFEVFYNSLFSQHFENCRDTSKIVNILMCFLDLLELLIASRIHLKLHFTCQRILFLKPSCMLEVITWPIQAFVKRKVIIFLKKCLLCKVGEDLCRGSVPALMPPDHHVAVDMLALANAVLQAVNSGLLKTLSVYEKHSFFGGDEVQPECELITSPDHVILRAASLVIMKSLEIKFQNYSSASEVKVDLQRFMSELLTFLKPHLQPSLQLHNPCKWLSRVFIEQDDDMLEAAKASLGIYLTLTRGCEATESLTQGKEMWDHHTHENGYNPHCIFLFFLKNIGFDSTVLLDFLISSETCFLEYFVRYLKLLQKDWDNFFTICNNFDATESKYDISICGCVPSLVQDQSSNQTIPHRLTAPHSHRDVCARHSWASDAPSEPLKAVMSKGAHTMCASSLSSPRASQSLVDYDSSDDSDVESTEQCLANSKQTSLHQQATKEIQDAAGTSRDKKEFSLEPPSRPLVLKEFDTAFSFDCEVAPNDVVSEVGIFYRIVKCFQELQDAICRLQKKNLFPYNPTALLKLLKYIEVISNKTMNTL

SEQ ID NO: 69345 - protein, 274 aa, Homo sapiens
MFQNSDKLLSHMAAQCLALLLYFQLREKITLSNSWIAFCQKNLSEYSESNKAIYCLWTLTAIIKEIFKDSCSQKTEILKQFLTHFDTIFEVFYNSLFSQHFENCRDTSKIVNILMCFLDLLELLIASRIHLKLHFTCQRILFLKPSCMLEVITWPIQAFVKRKVIIFLKKCLLCKVGEDLCRGSVPALMPPDHHVAVDMLALANAVLQAVNSGLLKTLSVYEKHSFFGGDEVQPECELITSPDHVILRAASLVIMKSLEIKFQNYSSASEVKGA

SEQ ID NO: 69346 - protein, 121 aa, Homo sapiens
MARGSLRRLLRLLVLGLWLALLRSVAGEQAPGTRDSGVGEPRAGAREPDWVSGEQRRTGGTGGCGDLGSGGLQTARSRLWEVPSLSKLHSQSGPQFLPPSNWGWGGSSVPQVRSTSNGERK

SEQ ID NO: 69347 - protein, 232 aa, Homo sapiens
MPNTSQVPGFLSGTVTVTSLWILVPSSQVDGKNVTCKVEHESFEKPQLLTVNLTVYYPPEVSISGYDNNWYLGQNEATLTCDARSNPEPTGYNWSTTMGPLPPFAVAQGAQLLIRPVDKPINTTLICNVTNALGARQAELTVQVKEGPPSEHSGMSRNAIIFLVLGILVFLILLGIGIYFYWSKCSREVLWHCHLCPSSTEHASASANGHVSYSAVSRENSSSQDPQTEGTR

SEQ ID NO: 69348 - protein, 548 aa, Homo sapiens [sequence omitted]

SEQ ID NO: 69349 - protein, 338 aa, Homo sapiens
MSAPTCLAHLPPCFLLLALVLVPSDASGQSSRNDWQVLQPEGPMLVAEGETLLLRCMVVGSCTDGMIKWVKVSTQDQQEIYNFKRGSFPGVMPMIQRTSEPLNCDYSIYIHNVTREHTGTYHCVRFDGLSEHSEMKSDEGTSVLVKGAGDPEPDLWIIQPQELVLGTTGDTVFLNCTVLGDGPPGPIRWFQGAGLSREAIYNFGGISHPKETAVQASNNDFSILLQNVSSEDAGTYYCVKFQRKPNRQYLSGQGTSLKVKAKSTSSKEAEFTSEPATEMSPTGLLVVFAPVVLGLKAITLAALLLALATSRRSPGQEDVKTTGPAGAMNTLAWSKGQE

SEQ ID NO: 69350 - protein, 367 aa, Homo sapiens
MIKVLIIFFLFACSLDVKTCNEVDLENSADWEVKTITSALKQYLRSLPEPLMTYELHGDFIVPAKSGSPESRVNAIHFLVHKLPEKNKEMLDILVKHLTNVSNHSKQNLMTVANLGVVFGPTLMRPQEETVAALMDLKFQNIVVEILIENHEKIFRTPPDTTFPEPTCLSASPPNAPPRQSKRQGQRTKRPVAVYNLCLELEDGDNPYPSKEDTPTSSLDSLSSPSPVTTAVPGPPGPDKNHLLADGGSFGDWASTIPGQTRSSMVQWLNPQSPTTTSSNSAVTPLSPGSSPFPFSPPATVADKPPESIRSRKARAVYPCEAEHSSELSFEIGAIFEDVQTSREPGWLEGTLNGKRGLIPQNYVKLL

SEQ ID NO: 69351 - protein, 441 aa, Homo sapiens
MSELMGLSVLLGLLALMATAAVARGWLRAGEERSGRPACQKANGFPPDKSSGSKKQKQYQRIRKEKPQQHNFTHRLLAAALKSHSGNISCMDFSSNGKYLATCADDRTIRIWSTKDFLQREHRSMRANVELDHATLVRFSPDCRAFIVWLANGDTLRVFKMTKREDGGYTFTATPEDFPKKHKAPVIDIGIANTGKFIMTASSDTTVLIWSLKGQVLSTINTNQMNNTHAAVSPCGRFVASCGFTPDVKVWEVCFGKKGEFQEVVRAFELKGHSAAVHSFAFSNDSRRMASVSKDGTWKLWDTDVEYKKKQDPYLLKTGRFEEAAGAAPCRLALSPNAQVLALASGSSIHLYNTRRGEKEECFERVHGECIANLSFDITGRFLASCGDRAVRLFHNTPGHRAMVEEMQGHLKRASNESTRQRLQQQLTQAQVTLGGPGAED

SEQ ID NO: 69352 - protein, 81 aa, Homo sapiens
MARGAALALLLFGLLGVLVAAPDGGFDLSDALPDNENKKPTAIPKKPSAGEKGFFLVCKEKEQIIFSDSRTGLRQLERRQK

SEQ ID NO: 69353 - protein, 797 aa, Homo sapiens
MLNSNVLLWITALAIKFTLIDSQAQYPVVNTNYGKIQGLRTPLPSEILGPVEQYLGVPYASPPTGERRFQPPESPSSWTGIRNATQFSAVCPQHLDERFLLHDMLPIWFTTSLDTLMTYVQDQNEDCLYLNIYVPMEDDIHEQNSKKPVMVYIHGGSYMEGTGNMIDGSILASYGNVIVITINYRLGILGFLSTGDQAAKGNYGLLDQIQALRWIEENVGAFGGDPKRVTIFGSGAGASCVSLLTLSHYSEGLFQKAIIQSGTALSSWAVNYQPAKYTRILADKVGCNMLDTTDMVECLKNKNYKELIQQTITPATYHIAFGPVIDGDVIPDDPQILMEQGEFLNYDIMLGVNQGEGLKFVDGIVDNEDGVTPNDFDFSVSNFVDNLYGYPEGKDTLRETIKFMYTDWADKENPETRRKTLVALFTDHQWVAPAVATADLHAQYGSPTYFYAFYHHCQSEMKPSWADSAHGDEVPYVFGIPMIGPTELFSCNFSKNDVMLSAVVMTYWTNFAKTGDPNQPVPQDTKFIHTKPNRFEEVAWSKYNPKDQLYLHIGLKPRVRDHYRATKVAFWLELVPHLHNLNEIFQYVSTTTKVPPPDMTSFPYGTRRSPAKIWPTTKRPAITPANNPKHSKDPHKTGPEDTTVLIETKRDYSTELSVTIAVGASLLFLNILAFAALYYKKDKRRHETHRHPSPQRNTTNDITHIQNEEIMSLQMKQLEHDHECESLQAHDTLRLTCPPDYTLTLRRSPDDIPFMTPNTITMIPNTLMGMQPLHTFKTFSGGQNSTNLPHGHSTTRV

SEQ ID NO: 69354 - protein, 62 aa, Homo sapiens
IWSILGLSGFHTYLVASNLTTNEDIKGSWSSKRGGEASVNPYSHKSIITNCCAVLCGPLPPR

SEQ ID NO: 69355 - protein, 50 aa, Homo sapiens
IDEYIVLWIALVFSFFDLIRYCVSVCNQIASHLHIHVFRIKVSTAHSNHH

SEQ ID NO: 69356 - protein, 110 aa, Homo sapiens
VFMIILGVFRIRAAHRRTMRDQDTGKENEMDWDDSALTITVNPMETYEDQHSSEEEEEEEEEEESEDGEEEDDITSAESESSEEEEGEQGDPQNATRQQQLEWDDSTLSY

SEQ ID NO: 69357 - protein, 207 aa, Homo sapiens
TRLLLLLLVFAVGFLCHDLRSHSSFQASLTGRLLRSSGFLPASQQACAKLYSYSLQGYSWLGETLPLWGSHLLTVVRPSLQLAWAHTNATVSFLSAHCASHLAWFGDSLTSLSQRLQIQLPDSVNQLLRYLRELPLLFHQNVLLPLWHLLLEALAWAQEHCHEACRGEVTWDCMKTQLSEAVHWTWLCLQDITVAFLDWALALISQQ

SEQ ID NO: 69358 - protein, 113 aa, Homo sapiens
ILIVIMFLWRPSANNQRYAFMPLIDDSDDEIEEFMVTSENLTEGIKLRASKSVSNGTAKPATSENFDEDLKWVEENIPSSFTDVALPVLVDSDEEIMTRSEMAEKMFSSEKIM

SEQ ID NO: 69359 - protein, 68 aa, Homo sapiens
ISSGLYLVVLLHLCEQSFSDMMGNTNEPSTRVRFINLARTLQAHMEDLETSEDDSEEDGDHNRTFDIA

SEQ ID NO: 69360 - protein, 46 aa, Homo sapiens
KMRLLLLLLVAASAMVRSEASANLGGVPSKRLKMQYATGPLLKFQI

SEQ ID NO: 69361 - protein, 26 aa, Homo sapiens
IALLQIFGICLAQNLVSDIEAVRASW

SEQ ID NO: 69362 - protein, 9 aa, Homo sapiens
ISLFSALLA

SEQ ID NO: 69363 - protein, 14 aa, Homo sapiens
LWGFLLSLLLFMGA

SEQ ID NO: 69364 - protein, 20 aa, Homo sapiens
LVVLGVVLLGQFVVRRFFKS

SEQ ID NO: 69365 - protein, 33 aa, Homo sapiens
VVFAALLLRVYARGRLKQRGKKAVPVESPVQKV

SEQ ID NO: 69366 - protein, 445 aa, Homo sapiens
LSLLLAVALGLATAVSAGPAVIECWFVEDASGKGLAKRPGALLLRQGPGEPPPRPDLDPELYLSVHDPAGALQAAFRRYPRGAPAPHCEMSRFVPLPASAKWASGLTPAQNCPRALDGAWLMVSISSPVLSLSSLLRPQPEPQQEPVLITMATVVLTVLTHTPAPRVRLGQDALLDLSFAYMPPTSEAASSLAPGPPPFGLEWRRQHLGKGHLLLAATPGLNGQMPAAQEGAVAFAAWDDDEPWGPWTGNGTFWLPTVQPFQEGTYLATIHLPYLQGQVTLELAVYKPPKVSLMPATLARAAPGEAPPELLCLVSHFYPSGGLEVEWELRGGPGGRSQKAEGQRWLSALRHHSDGSVSLSGHLQPPPVTTEQHGARYACRIHHPSLPASGRSAEVTLEVAGLSGPSLEDSVGLFLSAFLLLGLFKALGWAAVYLSTCKDSKKKAE

SEQ ID NO: 69367 - protein, 953 aa, Homo sapiens
IGQVLTVFFSVLIGAFSVGQASPSIEAFANARGAAYEIFKIIDNKPSIDSYSKSGHKPDNIKGNLEFRNVHFSYPSRKEVKILKGLNLKVQSGQTVALVGNSGCGKSTTVQLMQRLYDPTEGMVSVDGQDIRTINVRFLREIIGVVSQEPVLFATTIAENIRYGRENVTMDEIEKAVKEANAYDFIMKLPHKFDTLVGERGAQLSGGQKQRIAIARALVRNPKILLLDEATSALDTESEAVVQVALDKARKGRTTIVIAHRLSTVRNADVIAGFDDGVIVEKGNHDELMKEKGIYFKLVTMQTAGNEVELENAADESKSEIDALEMSSNDSRSSLIRKRSTRRSVRGSQAQDRKLSTKEALDESIPPVSFWRIMKLNLTEWPYFVVGVFCAIINGGLQPAFAIIFSKIIGVFTRIDDPETKRQNSNLFSLLFLALGIISFITFFLQGFTFGKAGEILTKRLRYMVFRSMLRQDVSWFDDPKNTTGALTTRLANDAAQVKGAIGSRLAVITQNIANLGTGIIISFIYGWQLTLLLLAIVPIIAIAGVVEMKMLSGQALKDKKELEGSGKIATEAIENFRTVVSLTQEQKFEHMYAQSLQVPYRNSLRKAHIFGITFSFTQAMMYFSYAGCFRFGAYLVAHKLMSFEDVLLVFSAVVFGAMAVGQVSSFAPDYAKAKISAAHIIMIIEKTPLIDSYSTEGLMPNTLEGNVTFGEVVFNYPTRPDIPVLQGLSLEVKKGQTLALVGSSGCGKSTVVQLLERFYDPLAGKVLLDGKEIKRLNVQWLRAHLGIVSQEPILFDCSIAENIAYGDNSRVVSQEEIVRAAKEANIHAFIESLPNKYSTKVGDKGTQLSGGQKQRIAIARALVRQPHILLLDEATSALDTESEKVVQEALDKAREGRTCIVIAHRLSTIQNADLIVVFQNGRVKEHGTHQQLLAQKGIYFSMVSVQAGTKRQ

SEQ ID NO: 69368 - protein, 19 aa, Homo sapiens
IGLVLLVFIHCGSFSLPPP

SEQ ID NO: 69369 - protein, 654 aa, Homo sapiens
RRPRSAPATMRPRKAFLLLLLLGLVQLLAVAGAEGPDEDSSNRENAIEDEEEEEEEDDDEEEDDLEVKEENGVLVLNDANFDNFVADKDTVLLEFYAPWCGHCKQFAPEYEKIANILKDKDPPIPVAKIDATSASVLASRFDVSGYPTIKILKKGQAVDYEGSRTQEEIVAKVREVSQPDWTPPPEVTLVLTKENFDEVVNDADIILVEFYAPWCGHCKKLAPEYEKAAKELSKRSPPIPLAKVDATAETDLAKRFDVSGYPTLKIFRKGRPYDYNGPREKYGIVDYMIEQSGPPSKEILTLKQVQEFLKDGDDVIIIGVFKGESDPAYQQYQDAANNLREDYKFHHTFSTEIAKFLKVSQGQLVVMQPEKFQSKYEPRSHMMDVQGSTQDSAIKDFVLKYALPLVGHRKVSNDAKRYTRRPLVVVYYSVDFSFDYRAATQFWRSKVLEVAKDFPEYTFAIADEEDYAGEVKDLGLSESGEDVNAAILDESGKKFAMEPEEFDSDTLREFVTAFKKGKLKPVIKSQPVPKNNKGPVKVVVGKTFDSIVMDPKKDVLIEFYAPWCGHCKQLEPVYNSLAKKYKGQKGLVIAKMDATANDVPSDRYKVEGFPTIYFAPSGDKKNPVKFEGGDRDLEHLSKFIEEHATKLSRTKEEL

SEQ ID NO: 69370 - protein, 276 aa, Homo sapiens
ITVVCTLLWLYKQVLEPSFRRAFRNTNRWFLTCINQPQFRAVLGELKLCEKMAQFDAKKFAETQPKKDTPRKEKGSREEKQKPQAERKEEKKAAAPAPEEEMDECEQALAAEPKAKDPFAHLPKSTFVLDEFKRKYSNEDTLSVALPYFWEHFDKDGWSLWYSEYRFPEELTQTFMSCNLITGMFQRLDKLRKNAFASVILFGTNNSSSISGVWVFRGQELAFPLSPDWQVDYESYTWRKLDPGREETQTLVREYFSWEGAFQHVGKAFNHGKIFK

SEQ ID NO: 69371 - protein, 481 aa, Homo sapiens
KDDRCKIPLFMLMSFMPASAVPPFSCGVISTLRSREEGAVDKSYCTLLDCLCSWGQVGHILELVDNWLPTEHAQAKSNTASKGRVQIHDTRPVKPELALVYIEYLLTHPKNRECLLSAPRKKLNHLLKALETSKADLESLLQTPGGKPRGFSEAAAPRAFGLHCRLSIHLQHKFCSEGKVYLSMLEDTGFWLESKILSFIQDQEEDYLKLHRVIYQQIIQTYLTVCKDVVMVGLGDHQFQMQLLQRSLGIMQTVKGFFYVSLLLDILKEITGSSLIQKTDSDEEVAMLLDTVQKVFQKMLECIARSFRKQPEEGLRLLYSVQRPLHEFITAVQSRHTDTPVHRGVLSTLIAGPVVEISHQLRKVSDVEELTPPEHLSDLPPFSRCLIGIIIKSSNVVRSFLDELKACVASNDIEGIVCLTAAVHIILVINAGKHKSSKVREVAATVHRKLKTFMEITLEEDSIERFLYESSSRTLGELLNS

SEQ ID NO: 69372 - protein, 121 aa, Homo sapiens
VPELAIPVVYLLGALTMLSETQHKLLAEALESQTLLGPLELVGSLLEQSAPWQERSTMSLPPGLLGNSWGEGAPAWVLLDECGLELGEDTPHVCWEPQAQGRMCALYASLALLSGLSQEPH

SEQ ID NO: 69373 - protein, 63 aa, Homo sapiens
RGPMSFLAGLGLAVGLALLLYCYPPDPKGLPGTRRVLGFSPVIIDRHVSRYLLAFLADDLGGL

SEQ ID NO: 69374 - protein, 72 aa, Homo sapiens
ITQAKLQMHLMILQMTGLSILALLGKSTTTIVEQKFHNGKNQKSGLKENRDKKKQTRWQSTASQKIGITEER

SEQ ID NO: 69375 - protein, 26 aa, Homo sapiens
VQVAINTLVLLVLWRKPMPQRKDKVR

SEQ ID NO: 69376 - protein, 116 aa, Homo sapiens
VGIVCATILLLPVLILIVKKTCGNKSSVNSTVLVKNTKKTNPEIKEKPCHFERCEGEKHIYSPIIVREVIEEEEPSEKSEATYMTMHPVWPSLRSDRNNSLEKKSGGGMPKTQQAF

SEQ ID NO: 69377 - protein, 195 aa, Homo sapiens
LLVLLAALLATVSGYFVSIDAHAEECFFERVTSGTKMGLIFEVAEGGFLDIDVEITGPDNKGIYKGDRESSGKYTFAAHMDGTYKFCFSNRMSTMTPKIVMFTIDIGEAPKGQDMETEAHQNKLEEMINELAVAMTAVKHEQEYMEVRERIHRAINDNTNSRVVLWSFFEALVLVAMTLGQIYYLKRFFEVRRVV

SEQ ID NO: 69378 - protein, 292 aa, Homo sapiens
LAGRLPAGPRGMGTALKLLLGAGAVAYGVRESVFTVEGGHRAIFFNRIGGVQQDTILAEGLHFRIPWFQYPIIYDIRARPRKISSPTGSKDLQMVNISLRVLSRPNAQELPSMYQRLGLDYEERVLPSIVNEVLKSVVAKFNASQLITQRAQVSLLIRRELTERAKDFSLILDDVAITELSFSREYTAAVEAKQVAQQEAQRAQFLVEKAKQEQRQKIVQAEGEAEAAKMLGEALSKNPGYIKLRKIRAAQNISKTIATSQNRIYLTADNLVLNLQDESFTRGSDSLIKGKK

SEQ ID NO: 69379 - protein, 68 aa, Homo sapiens
LHLVLFALWYLPVPHHLYPQGLGDHAAEAEKGKREEGGTQVALWLRVQPSCPSPVCLEPVPPRSRFLL

SEQ ID NO: 69380 - protein, 27 aa, Homo sapiens
LGFWPRRWRLWLAVTLAFQARPGEATR

SEQ ID NO: 69381 - protein, 80 aa, Homo sapiens
LFFTFTAVMFGTQIHSICNDETEIERLKSEKPTWERRLRWEGMKSVFGGPPSLLWMNPFVGFRFRRLPTRPRKGGPEFSV

SEQ ID NO: 69382 - protein, 16 aa, Homo sapiens
LASFLLLLFSSLLLCR

SEQ ID NO: 69383 - protein, 235 aa, Homo sapiens
RLLLLPLLLALARGLPGALAAQEVQQSPHCTTVPVGASVNITCSTSGGLRGIYLRQLGPQPQDIIYYEDGVVPTTDRRFRGRIDFSGSQDNLTITMHRLQLSDTGTYTCQAITEVNVYGSGTLVLVTEEQSQGWHRCSDAPPRASALPAPPTGSALPDPQTASALPDPPAASALPAALAVISFLLGLGLGVACVLARTQIKKLCSWRDKNSAACVVYEDMSHSRCNTLSSPNQYQ

SEQ ID NO: 69384 - protein, 41 aa, Homo sapiens
LVTATLLLLSWLRAQERLRPLGLLVAMKESLLLSEQKTSLP

SEQ ID NO: 69385 - protein, 429 aa, Homo sapiens
LGLRPPLLALVGLLSLGCVLSQECTKFKVSSCRECIESGPGCTWCQKLNFTGPGDPDSIRCDTRPQLLMRGCAADDIMDPTSLAETQEDHNGGQKQLSPQKVTLYLRPGQAAAFNVTFRRAKGYPIDLYYLMDLSYSMLDDLRNVKKLGGDLLRALNEITESGRIGFGSFVDKTVLPFVNTHPDKLRNPCPNKEKECQPPFAFRHVLKLTNNSNQFQTEVGKQLISGNLDAPEGGLDAMMQVAACPEEIGWRNVTRLLVFATDDGFHFAGDGKLGAILTPNDGRCHLEDNLYKRSNEFDYPSVGQLAHKLAENNIQPIFAVTSRMVKTYEKLTEIIPKSAVGELSEDSSNVVHLIKNAYNVSLPHHSAGTHGVASNLPTAGQLLLQVSRRVVWEESPCPVGQLQPPDLPSGLQDTLARHFHGELWVLSR

SEQ ID NO: 69386 - protein, 238 aa, Homo sapiens
RQNGLMSGLMQMLLLKVSAHITEQLGMAPGGEFREAFKEASKVPFCKFHLGDRPIPVTFKRAIAALSFWQKVRLAWGLCFLSDPISKDDVERCKQKDLLEQMMAEMIGEFPDLHRTIVSERDVYLTYMLRQAARRLELPRASDAEPRKCVPSVVVGVVGMGHVPGIEKNWSTDLNIQEIMTVPPPSVSGRVSRLAVKAAFFGLLGYSLYWMGRRTASLVLSLPAAQYCLQRVTEARHK

SEQ ID NO: 69387 - protein, 156 aa, Homo sapiens
IGNFGLSLEQSRAQMALWTVLAAPLLMSTDLRTISAQNMDILQNPLMIKINQDPLGIQGRRIHKEKSLIEVYMRPLSNKASALVFFSCRTDMPYRYHSSLGQLNFTGSVIYEAQDVYSGDIISGLRDETNFTVIINPSGVVMWYLYPIKNLEMSQQ

SEQ ID NO: 69388 - protein, 326 aa, Homo sapiens
VEMLRLRIGLIIQVMATELARSLNCSGEEASESLMNLSPFDMKNLLHHILSGKEFGVERSVRPIHSSTSSPTISIHEVGHTGVTKTERSGINRLRSEMKQMTRRFSADEQFFSVGQAASSSAHSSKSARSSTPSSPTGTSSSDSGGHHIGWGERQGQWLRRRRLDGAINRVPVGFYQRVWKILQKCHGLSIDGYVLPSSTTREMTPHEIKFAVHVESVLNRVPQPEYRQLLVEAIMVLTLLSDTEMTSIGGIIHVDQIVQMASQLFLQDQVSIGAMDTLEKDQATGICHFFYDSAPSGAYGTMTYLTRAVASYLQELLPNSGCQMQ

SEQ ID NO: 69389 - protein, 87 aa, Homo sapiens
IVLQTLLAFAVTCYGIVHIAGEFKDMDATSELKNKTFDTLRNHPSFYVFNHRGRVLFRPSDTANSSNQDALSSNTSLKLRKLESLRR

SEQ ID NO: 69390 - protein, 106 aa, Homo sapiens
MMPIVNISEVLGPLCLMLLMGTVHCQIVSTQITRPSGNNGNRRRRVSLLLPRLECNGAISAHCNRYLLSSSDSPASASQVAGITCVCHHTQLIFFFEFSRDGISPC

SEQ ID NO: 69391 - protein, 67 aa, Homo sapiens
MFLLLLFPLASHLGRVGSAPPSHPPSSVWTIEPHPAPRTAPGRPKRRMYFIWLGWIPSDKPSQLTER

SEQ ID NO: 69392 - protein, 61 aa, Homo sapiens
MKKHRRALALVSCLFLCSLVWLPSWRVCCKESSSASASSYYSQDDNCALENEDVQFQKKVP

SEQ ID NO: 69393 - protein, 79 aa, Homo sapiens
MATTLGIAFILNASLMVQGEQAFLCFLNVPPHFACHHVRCVFAPPLPSTMIVRPPQPCGTVSLLNLFFFTNYPVSGISS

SEQ ID NO: 69394 - protein, 720 aa, Homo sapiens
MAVFALLAHWVACVWFYIGQREIESSESELPEIGWLQELARRLETPYYLVGRRPAGGNSSGQSDNCSSSSEANGTGLELLGGPSLRSAYITSLYFALSSLTSVGFGNVSANTDTEKIFSICTMLIGALMHAVVFGNVTAIIQRMYARRFLYHSRTRDLRDYIRIHRIPKPLKQRMLEYFQATWAVNNGIDTTELLQSLPDELRADIAMHLHKEVLQLPLFEAASRGCLRALSLALRPAFCTPGEYLIHQGDALQALYFVCSGSMEVLKGGTVLAILGKGDLIGCELPRREQVVKANADVKGLTYCVLQCLQLAGLHDSLALYPEFAPRFSRGLRGELSYNLGAGGGSAEVDTSSLSGDNTLMSTLEEKETDGEQGPTVSPAPADEPSSPLLSPGCTSSSSAAKLLSPRRTAPRPRLGGRGRPGRAGALKAEAGPSAPPRALEGLRLPPMPWNVPPDLSPRVVDGIEDGCGSDQPKFSFRVGQSGPECSSSPSPGPESGLLTVPHGPSEARNTDTLDKLRQAVTELSEQVLQMREGLQSLRQAVQLVLAPHREGPCPRASGEGPCPASTSGLLQPLCVDTGASSYCLQPPAGSVLSGTWPHPRPGPPPLMAPWPWGPPASQSSPWPRATAFWTSTSDSEPPASGDLCSEPSTPASPPPSEEGARTGPAEPVSQAEATSTGEPPPGSGGLALPWDPHSLEMVLIGCHGSGTVQWTQEEGTGV

SEQ ID NO: 69395 - protein, 614 aa, Homo sapiens [sequence omitted]

SEQ ID NO: 69396 - protein, 152 aa, Homo sapiens
MYWHVRFLFSFPLLSASTFCSLRLPTEYERNGRYEGSSRNVSAEQKDENKEAKPRSLRFTWSMKTTSSMDPGDMMREIRKVLDANNCDYEQRERFLLFCVHGDGHAENLVQWEMEVCKLPRLSLNGVRFKRISGTSIAFKNIASKIANELKL

SEQ ID NO: 69397 - protein, 21 aa, Homo sapiens
MLMTDLLLINMWVNLCWGSQL

SEQ ID NO: 69398 - protein, 426 aa, Homo sapiens
MLPLLLPLLWAGALAQERRFQLEGPESLTVQEGLCVLVPCRLPTTLPASYYGYGYWFLEGADVPVATNDPDEEVQEETRGRFHLLWDPRRKNCSLSIRDARRRDNAAYFFRLKSKWMKYGYTSSKLSVRVMALTHRPNISIPGTLESGHPSNLTCSVPWVCEQGTPPIFSWMSAAPTSLGPRTTQSSVLTITPRPQDHSTNLTCQVTFPGAGVTMERTIQLNVSSFKILQNTSSLPVLEGQALRLLCDADGNPPAHLSWFQGFPALNATPISNTGVLELPQVGSAEEGDFTCRAQHPLGSLQISLSLFVHWKPEGRAGGVLGAVWGASITTLVFLCVCFIFRVKTRRKKAAQPVQNTDDVNPVMVSGSRGHQHQFQTGIVSDHPAEAGPISEDEQELHYAVLHFHKVQPQEPKVTDTEYSEIKIHK

SEQ ID NO: 69399 - protein, 523 aa, Homo sapiens [sequence omitted]

SEQ ID NO: 69400 - protein, 65 aa, Homo sapiens [sequence omitted]

SEQ ID NO: 69401 - protein, 69 aa, Homo sapiens
MIYVSTGAWGWAGSCFWQWSFCPPACVGCIEERLPVPSSEGPDLRGRDKRGTKEDPRADYACIAENKPT

SEQ ID NO: 69402 - protein, 43 aa, Homo sapiens
MNSSLLLFLISLRTNLSTFFRNPCKRPISLNRHWQKRHIWMPV

SEQ ID NO: 69403 - protein, 194 aa, Homo sapiens
RTGGRARALEATGMMLRVLVGAVLPAMLLAAPPPINKLALFPDKSAWCEAKNITQIVGHSGCEAKSIQNRACLGQCFSYSVPNTFPQSTESLVHCDSCMPAQSMWEIVTLECPGHEEVPRVDKLVEKILHCSCQACGKEPSHEGLSVYVQGEDGPGSQPGTHPHPHPHPHPGGQTPEPEDPPGAPHTEEEGAED

SEQ ID NO: 69404 - protein, 182 aa, Homo sapiens
VAAAWLLLWAAACAQQEQDFYDFKAVNIRGKLVSLEKYRGSVSLVVNVASECGFTDQHYRALQQLQRDLGPHHFNVLAFPCNQFGQQEPDSNKEIESFARRTYSVSFPMFSKIAVTGTGAHPAFKYLAQTSGKEPTWNFWKYLVAPDGKVVGAWDPTVSVEEVRPQITALVRKLILLKREDL

SEQ ID NO: 69405 - protein, 118 aa, Homo sapiens
VVLLAFIVTACVLCYLFISSKPHTKLDLGLSLQTAGPEEVSPDCQGVNTGMAAEVPKVSPLQQSYSCLNPQLESNEGQAVNSKRLLHHCFMATVTTSDIPGSPEEASVPNPDLCGPVP

SEQ ID NO: 69406 - protein, 41 aa, Homo sapiens
LLATSLKWNLLVALLPLQLWCYTEKLEVSKQTREKEKHQKV

SEQ ID NO: 69407 - protein, 194 aa, Homo sapiens
ICFKFLGLLTACRMLLEPGRGCCALAILLAIVDIQSGGCINITSSASQEGTRLNLICTVWHKKEEAEGFVVFLCKDRSGDCSPETSLKQLRLKRDPGIDGVGEISSQLMFTISQVTPLHSGTYQCCARSQKSGIRLQGHFFSILFTETGNYTVTGLKQRQHLEFSHNEGTLSSGFLQEKVWVMLVTSLVALQAL

SEQ ID NO: 69408 - protein, 136 aa, Homo sapiens
LSGRLVLGLVSMAGRVCLCQGSAGSGAIGPVEAAIRTKLEEALSPEVLELRNESGGHAVPPGSETHFRVAVVSSRFEGLSPLQRHRLVHAALAEELGGPVHALAIQARTPAQWRENSQLDTSPPCLGGNKKTLGTP

SEQ ID NO: 69409 - protein, 10 aa, Homo sapiens
LSSRFMLLIF

SEQ ID NO: 69410 - protein, 637 aa, Homo sapiens
KPQRSQLQIFSSVLQTSLLFLLMGLRASGKDSAPTVVSGILGGSVTLPLNISVDTEIENVIWIGPKNALAFARPKENVTIMVKSYLGRLDITKWSYSLCISNLTLNDAGSYKAQINQRNFEVTTEEEFTLFVYEQLQEPQVTMKSVKVSENFSCNITLMCSVKGAEKSVLYSWTPREPHASESNGGSILTVSRTPCDPDLPYICTAQNPVSQRSSLPVHVGQFCTDPGASRGGTTGETVVGVLGEPVTLPLALPACRDTEKVVWLFNTSIISKEREEAATADPLIKSRDPYKNRVWVSSQDCSLKISQLKIEDAGPYHAYVCSEASSVTSMTHVTLLIYRRLRKPKITWSLRHSEDGICRISLTCSVEDGGNTVMYTWTPLQKEAVVSQGESHLNVSWRSSENHPNLTCTASNPVSRSSHQFLSENICSGPERNTKLWIGLFLMVCLLCVGIFSWCIWKRKGRCSVPAFCSSQAEAPADTPEPTAGHTLYSVLSQGYEKLDTPLRPARQQPTPTSDSSSDSNLTTEEDEDRPEVHKPISGRYEVFDQVTQEGAGHDPAPEGQADYDPVTPYVTEVESVVGENTMYAQVFNLQGKTPVSQKEESSATIYCSIRKPQVVPPPQQNDLEIPESPTYENFT

SEQ ID NO: 69411 - protein, 88 aa, Homo sapiens
RVNVSITLCVLGLIDTETAMKAVSGIVHMQAAPKEECALEIIKGGALRQEEVYYDSSLWTTLLIRNPCRKILEFLYSTSYNMDRFINK

SEQ ID NO: 69412 - protein, 46 aa, Homo sapiens
ISVLSRLKVTRLLLPIFRLLLAEAERLTLHNMAAWCVWCPRADESR

SEQ ID NO: 69413 - protein, 1118 aa, Homo sapiens
ISSLSWFTTIVPLVLVLTITAVKDATDDYFRHKSDNQVNNRQSQVLINGILQQEQWMNVCVGDIIKLENNQFVAADLLLLSSSEPHGLCYIETAELDGETNMKVRQAIPVTSELGDISKLAKFDGEVICEPPNNKLDKFSGTLYWKENKFPLSNQNMLLRGCVLRNTEWCFGLVIFAGPDTKLMQNSGRTKFKRTSIDRLMNTLVLWIFGFLVCMGVILAIGNAIWEHEVGMRFQVYLPWDEAVDSAFFSGFLSFWSYIIILNTVVPISLYVSVEVIRLGHSYFINWDKKMFCMKKRTPAEARTTTLNEELGQVEYIFSDKTGTLTQNIMVFNKCSINGHSYGDVFDVLGHKAELGERPEPVDFSFNPLADKKFLFWDPSLLEAVKIGDPHTHEFFRLLSLCHTVMSEEKNEGELYYKAQSPDEGALVTAARNFGFVFRSRTPKTITVHEMGTAITYQLLAILDFNNIRKRMSVIVRNPEGKIRLYCKGADTILLDRLHHSTQELLNTTMDHLNEYAGEGLRTLVLAYKDLDEEYYEEWAERRLQASLAQDSREDRLASIYEEVENNMMLLGATAIEDKLQQGVPETIALLTLANIKIWVLTGDKQETAVNIGYSCKMLTDDMTEVFIVTGHTVLEVREELRKAREKMMDSSRSVGNGFTYQDKLSSSKLTSVLEAVAGEYALVINGHSLAHALEADMELEFLETACACKAVICCRVTPLQKAQVVELVKKYKKAVTLAIGDGANDVSMIKTAHIGVGISGQEGIQAVLASDYSFSQFKFLQRLLLVHGRWSYLRMCKFLCYFFYKNFAFTMVHFWFGFFCGFSAQTVYDQYFITLYNIVYTSLPVLAMGVFDQDVPEQRSMEYPKLYEPGQLNLLFNKREFFICIAQGIYTSVLMFFIPYGVFADATRDDGTQLADYQSFAVTVATSLVIVVSVQIGLDTGYWTAINHFFIWGSLAVYFAILFAMHSNGLFDMFPNQFRFVGNAQNTLAQPTVWLTIVLTTVVCIMPVVAFRFLRLNLKPDLSDTVRYTQLVRKKQKAQHRCMRRVGRTGSRRSGYAFSHQEGFGELIMSGKNMRLSSLALSSFTTRSSSSWIESLRRKKSDSASSPSGGADKPLKG

SEQ ID NO: 69414 - protein, 27 aa, Homo sapiens
LWTAVLFLAPVAGTPAAPPKAVLKLEP

SEQ ID NO: 69415 - protein, 18 aa, Homo sapiens
MPKRQMKAIKFLLFHFYL

SEQ ID NO: 69416 - protein, 91 aa, Homo sapiens
MALSSVLCIPLYAMFRLCRTDGDTLLQRLKNATKPSRDWGPALLEHRTGRYAPTIAPSPEDGFEVQPLHPDKAQIPIVGSNGSSRLQDSRI

SEQ ID NO: 69417 - protein, 21 aa, Homo sapiens
LIIGILVVFLMFSAVKHFKIY

SEQ ID NO: 69418 - protein, 12 aa, Homo sapiens
LFFRLGMLLTAG

SEQ ID NO: 69419 - protein, 13 aa, Homo sapiens
LLPLFVQLFVFVK

SEQ ID NO: 69420 - protein, 21 aa, Homo sapiens
LFGLFIMLSALFSKLASALDS

SEQ ID NO: 69421 - protein, 366 aa, Homo sapiens
VVTLILLLLLKVYQGKGCQGSADHVVSISGVPLQLQPNSIQTKVDSIAWKKLLPSQNGFHHILKWENGSLPSNTSNDRFSFIVKNLSLLIKAAQQQDSGLYCLEVTSISGKVQTATFQVFVFESLLPDKVEKPRLQGQGKILDRGRCQVALSCLVSRDGNVSYAWYRGSKLIQTAGNLTYLDEEVDINGTHTYTCNVSNPVSWESHTLNLTQDCQNAHQEFRFWPFLVIIVILSALFLGTLACFCVWRRKRKEKQSETSPKEFLTIYEDVKDLKTRRNHEQEQTFPGGGSTIYSMIQSQSSAPTSQEPAYTLYSLIQPSRKSGSRKRNHSPSFNSTIYEVIGKSQPKAQNPARLSRKELENFDVYS

SEQ ID NO: 69422 - protein, 13 aa, Homo sapiens
LNLIMITSVLNFC

SEQ ID NO: 69423 - protein, 43 aa, Homo sapiens
ITLFLLAVCVCFLCIQKTEEMKKQKKRNEESDWKEGFSRTSPV

SEQ ID NO: 69424 - protein, 18 aa, Homo sapiens
LFTTAHSGAHGMLAVLVL

SEQ ID NO: 69425 - protein, 14 aa, Homo sapiens
RLAGLLIFFLISNF

SEQ ID NO: 69426 - protein, 28 aa, Homo sapiens
LKVMIISVPLCLIIEFSAIGPLLKDGIK

SEQ ID NO: 69427 - protein, 39 aa, Homo sapiens
TVSPAVSMIVFLLQVLLMFKIACQLLSHEFSNKKMKSLC

SEQ ID NO: 69428 - protein, 26 aa, Homo sapiens
IGEGVSFFLFFFLEPVLIALNKYSLK

SEQ ID NO: 69429 - protein, 153 aa, Homo sapiens
RHLSGCPTMATWALLLLAAMLLGNPGLVFSRLSPEYYDLARAHLRDEEKSCPCLAQEGPQGDLLTKTQELGRDYRTCLTIVQKLKKMVDKPTQRSVSNAATRVCRTGRSRWRDVCRNFMRRYQSRVTQGLVAGETAQQICEDLRLCIPSTGPL

SEQ ID NO: 69430 - protein, 13 aa, Homo sapiens
LLNSALSLLVACI

SEQ ID NO: 69431 - protein, 335 aa, Homo sapiens
IALMNALTVNLHLLMLSFFKPTPKRYKILLEAKAFPSDHYAIESQLQLHGLNIEESMRMIKPREGEETLRIEDILEVIEKEGDSIAVILFSGVHFYTGQHFNIPAITKAGQAKGCYVGFDLAHAVGNVELYLHDWGVDFACWCSYKYLNAGAGGIAGAFIHEKHAHTIKPALVGWFGHELSTRFKMDNKLQLIPGVCGFRISNPPILLVCSLHASLEIFKQATMKALRKKSVLLTGYLEYLIKHNYGKDKAATKKPVVNIITPSHVEERGCQLTITFSVPNKDVFQELEKRGVVCDKRNPNGIRVAPVPLYNSFHDVYKFTNLLTSILDSAETKN

SEQ ID NO: 69432 - protein, 37 aa, Homo sapiens
IYVMKIIIPALTVVCLRESNNMMFLKAPAELRAREIE

SEQ ID NO: 69433 - protein, 206 aa, Homo sapiens
RTWPCTLLFFLLFIPVFCKAMHVAQPAVVLASSRGIASFVCEYASPGKATEVRVTVLRQADSQVTEVCAATYMMGNELTFLDDSICTGTSSGNQVNLTIQGLRAMDTGLYICKVELMYPPPYYLGIGNGTQIYVIDPEPCPDSDFLLWILAAVSSGLFFYSFLLTAVSLSKMLKKRSPLTTGVYVKMPPTEPECEKQFQPYFIPIN

SEQ ID NO: 69434 - protein, 24 aa, Homo sapiens
KLWVFFFFFLSGGMGTPKLIWQQR

SEQ ID NO: 69435 - protein, 20 aa, Homo sapiens
RGKFILLSSLMMMLFSMLKN

SEQ ID NO: 69436 - protein, 1103 aa, Homo sapiens
LLLLLLLLGLAARTVAAGRARGLPAPTAEAAFGLGAAAAPTSATRVPAAGAVAAAEVTVEDAEALPAAAGEQEPRGPEPDDETELRPRGRSLVIISTLDGRIAALDPENHGKKQWDLDVGSGSLVSSSLSKPEVFGNKMIIPSLDGALFQWDQDRESMETVPFTVESLLESSYKFGDDVVLVGGKSLTTYGLSAYSGKVRYICSALGCRQWDSDEMEQEEDILLLQRTQKTVRAVGPRSGNEKWNFSVGHFELRYIPDMETRAGFIESTFKPNENTEESKIISDVEEQEAAIMDIVIKVSVADWKVMAFSKKGGHLEWEYQFCTPIASAWLLKDGKVIPISLFDDTSYTSNDDVLEDEEDIVEAARGATENSVYLGMYRGQLYLQSSVRISEKFPSSPKALESVTNENAIIPLPTIKWKPLIHSPSRTPVLVGSDEFDKCLSNDKFSHEEYSNGALSILQYPYDNGYYLPYYKRERNKRSTQITVRFLDNPHYNKNIRKKDPVLLLHWWKEIVATILFCIIATTFIVRRLFHPHPHRQRKESETQCQTENKYDSVSGEANDSSWNDIKNSGYISRYLTDFEPIQCLGRGGFGVVFEAKNKVDDCNYAIKRIRLPNRELAREKVMREVKALAKLEHPGIVRYFNAWLEAPPEKWQEKMDEIWLKDESTDWPLSSPSPMDAPSVKIRRMDPFATKEHIEIIAPSPQRSRSFSVGISCDQTSSSESQFSPLEFSGMDHEDISESVDAAYNLQDSCLTDCDVEDGTMDGNDEGHSFELCPSEASPYVRSRERTSSSIVFEDSGCDNASSKEEPKTNRLHIGNHCANKLTAFKPTSSKSSSEATLSISPPRPTTLSLDLTKNTTEKLQPSSPKVYLYIQMQLCRKENLKDWMNGRCTIEERERSVCLHIFLQIAEAVEFLHSKGLMHRDLKPSNIFFTMDDVVKVGDFGLVTAMDQDEEEQTVLTPMPAYARHTGQVGTKLYMSPEQIHGNSYSHKVDIFSLGLILFELLYPFSTQMERVRTLTDVRNLKFPPLFTQKYPCEYVMVQDMLSPSPMERPEAINIIENAVFEDLDFPGKTVLRQRSRSLSSSGTKHSRQSNNSHSPLPSN

SEQ ID NO: 69437 - protein, 16 aa, Homo sapiens
VFFCLTCFLSLHRLSI

SEQ ID NO: 69438 - protein, 12 aa, Homo sapiens
MFLGSLMTFYTL

SEQ ID NO: 69439 - protein, 403 aa, Homo sapiens
LVEGTMNWHLPLFLLASVTLPSICSHFNPLSLEELGSNTGIQVFNQIVKSRPHDNIVISPHGIASVLGMLQLGADGRTKKQLAMVMRYGVNGVGKILKKINKAIVSKKNKDIVTVANAVFVKNASEIEVPFVTRNKDVFQCEVRNVNFEDPASACDSINAWVKNETRDMIDNLLSPDLIDGVLTRLVLVNAVYFKGLWKSRFQPENTKKRTFVAADGKSYQVPMLAQLSVFRCGSTSAPNDLWYNFIELPYHGESISMLIALPTESSTPLSAIIPHISTKTIDSWMSIMVPKRVQVILPKFTAVAQTDLKEPLKVLGITDMFDSSKANFAKITTGSENLHVSHILQKAKIEVSEDGTKASAATTAILIARSSPPWFIVDRPFLFFIRHNPTGAVLFMGQINKP

SEQ ID NO: 69440 - protein, 22 aa, Homo sapiens
LFGKSVRFMMLVMACTSSHVHG

SEQ ID NO: 69441 - protein, 18 aa, Homo sapiens
IFSLCFFLFQFILNAYFS

SEQ ID NO: 69442 - protein, 20 aa, Homo sapiens
MFNFFPYLFIFTSLFSTCCV

SEQ ID NO: 69443 - protein, 16 aa, Homo sapiens
RSRWICGPLGLIKALV

SEQ ID NO: 69444 - protein, 28 aa, Homo sapiens
RFCWILFKFNLHLFLLLQERICKSTQTE

SEQ ID NO: 69445 - protein, 825 aa, Homo sapiens
LLGVLLLGAARLPRGAEAFEIALPRESNITVLIKLGTPTLLAKPCYIVISKRHITMLSIKSGERIVFTFSCQSPENHFVIEIQKNIDCMSGPCPFGEVQLQPSTSLLPTLNRTFIWDVKAHKSIGLELQFSIPRLRQIGPGESCPDGVTHSISGRIDATVVRIGTFCSNGTVSRIKMQEGVKMALHLPWFHPRNVSGFSIANRSSIKRLCIIESVFEGEGSATLMSANYPEGFPEDELMTWQFVVPAHLRASVSFLNFNLSNCERKEERVEYYIPGSTTNPEVFKLEDKQPGNMAGNFNLSLQGCDQDAQSPGILRLQFQVLVQHPQNESNKIYVVDLSNERAMSLTIEPRPVKQSRKFVPGCFVCLESRTCSSNLTLTSGSKHKISFLCDDLTRLWMNVEKTISCTDHRYCQRKSYSLQVPSDILHLPVELHDFSWKLLVPKDRLSLVLVPAQKLQQHTHEKPCNTSFSYLVASAIPSQDLYFGSFCPGGSIKQIQVKQNISVTLRTFAPSFQQEASRQGLTVSFIPYFKEEGVFTVTPDTKSKVYLRTPNWDRGLPSLTSVSWNISVPRDQVACLTFFKERSGVVCQTGRAFMIIQEQRTRAEEIFSLDEDVLPKPSFHHHSFWVNISNCSPTSGKQLDLLFSVTLTPRTVDLTVILIAAVGGGVLLLSALGLIICCVKKKKKKTNKGPAVGIYNDNINTEMPRQPKKFQKGRKDNDSHVYAVIEDTMVYGHLLQDSSGSFLQPEVDTYRPFQGTMGVCPPSPPTICSRAPTAKLATEEPPPRSPPESESEPYTFSHPNNGDVSSKDTDIPLLNTQEPMEPAE

SEQ ID NO: 69446 - protein, 16 aa, Homo sapiens
LYLLIYSFCIYQAQFW

SEQ ID NO: 69447 - protein, 126 aa, Homo sapiens
LCCAPLLLLLLLPPLLLTPRAGDAAVITGACDKDSQCGGGMCCAVSIWVKSIRICTPMGKLGDSCHPLTRKNNFGNGRQERRKRKRSKRKKEVPFFGRRMHHTCPCLPGLACLRTSFNRFICLAQK

SEQ ID NO: 69448 - protein, 16 aa, Homo sapiens
IVLRFWAIGRLVNMIH

SEQ ID NO: 69449 - protein, 1382 aa, Homo sapiens
ILTLSRGLGYYILTLLKTTEVLAIMGNQLAGIAPSQILSVESYFSDIHDFEYDKSLGSTRFFKVARAKHREGLVVVKVFAIQDPTLPLTSYKQELEELKIRLNSAQNCLPFQKASEKASEKAAMLFRQYVRDNLYDRISTRPFLNNIEKRWIAFQILTAVDQAHKSGVRHGDIKTENVMVTSWNWVLLTDFASFKPTYLPEDNPADFNYFFDTSRRRTCYIAPERFVDGGMFATELEYMRDPSTPLVDLNSNQRTRGELKRAMDIFSAGCVIAELFTEGVPLFDLSQLLAYRNGHFFPEQVLNKIEDHSIRELVTQMIHREPDKRLEAEDYLKQQRGNAFPEIFYTFLQPYMAQFAKETFLSADERILVIRKDLGNIIHNLCGHDLPEKAEGEPKENGLVILVSVITSCLQTLKYCDSKLAALELILHLAPRLSVEILLDRITPYLLHFSNDSVPRVRAEALRTLTKVLALVKEVPRNDINIYPEYILPGIAHLAQDDATIVRLAYAENIALLAETALRFLELVQLKNLNMENDPNNEEIDEVTHPNGNYDTELQALHEMVQQKVVTLLSDPENIVKQTLMENGITRLCVFFGRQKANDVLLSHMITFLNDKNDWHLRGAFFDSIVGVAAYVGWQSSSILKPLLQQGLSDAEEFVIVKALYALTCMCQLGLLQKPHVYEFASDIAPFLCHPNLWIRYGAVGFITVVARQISTADVYCKLMPYLDPYITQPIIQIERKLVLLSVLKEPVSRSIFDYALRSKDITSLFRHLHMRQKKRNGSLPDCPPPEDPAIAQLLKKLLSQGMTEEEEDKLLALKDFMMKSNKAKANIVDQSHLHDSSQKGVIDLAALGITGRQVDLVKTKQEPDDKRARKHVKQDSNVNEEWKSMFGSLDPPNMPQALPKGSDQEVIQTGKPPRSESSAGICVPLSTSSQVPEVTTVQNKKPVIPVLSSTILPSTYQIRITTCKTELQQLIQQKREQCNAERIAKQMMENAEWESKPPPPGWRPKGLLVAHLHEHKSAVNRIRVSDEHSLFATCSNDGTVKIWNSQKMEGKTTTTRSILTYSRIGGRVKTLTFCQGSHYLAIASDNGAVQLLGIEASKLPKSPKIHPLQSRILDQKEDGCVVDMHHFNSGAQSVLAYATVNGSLVGWDLRSSSNAWTLKHDLKSGLITSFAVDIHQCWLCIGTSSGTMACWDMRFQLPISSHCHPSRARIRRLSMHPLYQSWVIAAVQGNNEVSMWDMETGDRRFTLWASSAPPLSELQPSPHSVHGIYCSPADGNPILLTAGSDMKIRFWDLAYPERSYVVAGSTSSPSVSYYRKIIEGTEVVQEIQNKQKVGPSDDTPRRGPESLPVGHHDIITDVATFQTTQGFIVTASRDGIVKVWK

SEQ ID NO: 69450 - protein, 729 aa, Homo sapiens
ISWLLLASAALLEAALRNLNMDQKLSKLVEELTTSGEPRLNPEKMKELKKICKSSEEQLSRAYRLLIAQLTQEHAEIRLSAFQIVEELFVRSHQFRMLVVSNFQEFLELTLGTDPAQPLPPPREAAQRLRQATTRAVEGWNEKFGEAYKKLALGYHFLRHNKKVDFQDTNARSLAERKREEEKQKHLDKIYQERASQAEREMQEMSGEIESCLTEVESCFRLLVPFDFDPNPETESLGMASGMSDALRSSCAGQVGPCRSGTPDPRDGEQPCCSRDLPASAGHPRAGGGAQPSQTATGDPSDEDEDSDLEEFVRSHGLGSHKYTLDVELCSEGLKVQENEDNLALIHAARDTLKLIRNKFLPAVCSWIQRFTRVGTHGGCLKRAIDLKAELELVLRKYKELDIEPEGGERRRTEALGDAEEDEDDEDFVEVPEKEGYEPHIPDHLRPEYGLEAAPEKDTVVRCLRTRTRMDEEVSDPTSAAAQLRQLRDHLPPPSSASPSRALPEPQEAQKLAAERARAPVVPYGVDLHYWGQELPTAGKIVKSDSQHRFWKPSEVEEEVVNADISEMLRSRHITFAGKFEPVQHWCRAPRPDGRLCERQDRLKCPFHGKIVPRDDEGRPLDPEDRAREQRRQLQKQERPEWQDPELMRDVEAATGQDLGSSRYSGKGRGKKRRYPSLTNLKAQADTARARIGRKVFAKAAVRRVVAAMNRMDQKKHEKFSNQFNYALN

SEQ ID NO: 69451 - protein, 15 aa, Homo sapiens
VCFAVFLCFLEFGDS

SEQ ID NO: 69452 - protein, 17 aa, Homo sapiens
IAVILKVFFLPLFPSQR

SEQ ID NO: 69453 - protein, 28 aa, Homo sapiens
ISTVALMSMLTASMLDRQSFYCWIVQDI

SEQ ID NO: 69454 - protein, 22 aa, Homo sapiens
MYCFCIYLVFTLGKSFPTSSKT

SEQ ID NO: 69455 - protein, 51 aa, Homo sapiens
MDTQNILHTRLSLCSLSWVSLASSFATCLRRKAIVVQQKQSKISKRKRLKR

SEQ ID NO: 69456 - protein, 86 aa, Homo sapiens
RRMALSVLRLALLLLAVTFAASLIPQFGLFSKYRTPNCSQYRLPGCPRHFNPVCGSDMSTYANECTLCMKIREGGHNIKIIRNGPC

SEQ ID NO: 69457 - protein, 19 aa, Homo sapiens
MFLLTAFVCRLVFCSTQAC

SEQ ID NO: 69458 - protein, 542 aa, Homo sapiens
LLRSKPALPPPLMLLLLGPLGPLSPGALPRPAQAQDVVDLDFFTQEPLHLVSPSFLSVTIDANLATDPRFLILLGSPKLRTLARGLSPAYLRFGGTKTDFLIFDPKKESTFEERSYWQSQVNQDICKYGSIPPDVEEKLRLEWPYQEQLLLREHYQKKFKNSTYSRSSVDVLYTFANCSGLDLIFGLNALLRTADLQWNSSNAQLLLDYCSSKGYNISWELGNEPNSFLKKADIFINGSQLGEDFIQLHKLLRKSTFKNAKLYGPDVGQPRRKTAKMLKSFLKAGGEVIDSVTWHHYYLNGRTATKEDFLNPDVLDIFISSVQKVFQVVESTRPGKKVWLGETSSAYGGGAPLLSDTFAAGFMWLDKLGLSARMGIEVVMRQVFFGAGNYHLVDENFDPLPDYWLSLLFKKLVGTKVLMASVQGSKRRKLRVYLHCTNTDNPRYKEGDLTLYAINLHNVTKYLRLPYPFSNKQVDKYLLRPLGPHGLLSKSVQLNGLTLKMVDDQTLPPLMEKPLRPGSSLGLPAFSYSFFVIRNAKVAACI

SEQ ID NO: 69459 - protein, 84 aa, Homo sapiens
IGFTGGLVFMYVQCKVYVQLWRRLKAYNRVIFVQNCPDTAKKLEKNFSCNVNTDIKDAVVVPVPQTGANSLPSAEGGPPEVVSV

SEQ ID NO: 69460 - protein, 286 aa, Homo sapiens
VAIVITFILILPEYFKTPKERTLELSCLEVCLQSNFTYSLSSLNFSFVTFLQPVRETQIIMRIFLNPSNFRNFTRTCQDITGEFKMCSSCLVCESKGNMDFISQEQTSKVLIRRGSMEVKANDFHSPCQHFNFSVAPLVDHLEEYNTTCHLKNHTGRSTIMEDEPSKEKSINYTCRIMEYPNDCIHISLHLEMDIKNITCSMKITWYILVLLVFIFLIILTIRKILEGQRRVQKWQSHRDKPTSVLLRGSDSEKLRALNVQVLSAETTQRLPLDQVQEVLPPIPEL

SEQ ID NO: 69461 - protein, 13 aa, Homo sapiens
IIAGINFKLLFLF

SEQ ID NO: 69462 - protein, 36 aa, Homo sapiens
ISGRLWLATLGSACLRLSQPPRPCVVSSWVSERAGW

SEQ ID NO: 69463 - protein, 177 aa, Homo sapiens
LASVLLLLLLPELSGPLAVLLQAAEAAPGLGPPDPRPRTLPPLPPGPTPAQQPGRGLAEAAGPRGSEGGNGSNPVAGLETDDHGGKAGEGSVGGGLAVSPNPGDKPMTQRALTVLMVVSGAVLVYFVVRTVRMRRRNRKTRRYGVLDTNIENMELTPLEQDDEDDDNTLFDANHPRR

SEQ ID NO: 69464 - protein, 21 aa, Homo sapiens
RKLPMLGFSFSFTELLFLLPL

SEQ ID NO: 69465 - protein, 26 aa, Homo sapiens
KAPLTISLFFVGVLLGSFISGQLSDR

SEQ ID NO: 69466 - protein, 588 aa, Homo sapiens
LAALVLLPNVGLWALYRERQPDGTPGGSGAAVAPAAGQGSHSRQKKTFFLGDGQKLKDWHDKEAIRRDAQRVGNGEQGRPYPMTDAERVDQAYRENGFNIYVSDKISLNRSLPDIRHPNCNSKRYLETLPNTSIIIPFHNEGWSSLLRTVHSVLNRSPPELVAEIVLVDDFSDREHLKKPLEDYMALFPSVRILRTKKREGLIRTRMLGASVATGDVITFLDSHCEANVNWLPPLLDRIARNRKTIVCPMIDVIDHDDFRYETQAGDAMRGAFDWEMYYKRIPIPPELQKADPSDPFESPVMAGGLFAVDRKWFWELGGYDPGLEIWGGEQYEISFKVWMCGGRMEDIPCSRVGHIYRKYVPYKVPAGVSLARNLKRVAEVWMDEYAEYIYQRRPEYRHLSAGDVAVQKKLRSSLNCKSFKWFMTKIAWDLPKFYPPVEPPAAAWGEIRNVGTGLCADTKHGALGSPLRLEGCVRGRGEAAWNNMQVFTFTWREDIRPGDPQHTKKFCFDAISHTSPVTLYDCHSMKGNQLWKYRKDKTLYHPVSGSCMDCSESDHRIFMNTCNPSSLTQQWLFEHTNSTVLEKFNRN

SEQ ID NO: 69467 - protein, 916 aa, Homo sapiens
TLQTWLVQALFIFLTTESTGELLDPCGYISPESPVVQLHSNFTAVCVLKEKCMDYFHVNANYIVWKTNHFTIPKEQYTIINRTASSVTFTDIASLNIQLTCNILTFGQLEQNVYGITIISGLPPEKPKNLSCIVNEGKKMRCEWDGGRETHLETNFTLKSEWATHKFADCKAKRDTPTSCTVDYSTVYFVNIEVWVEAENALGKVTSDHINFDPVYKVKPNPPHNLSVINSEELSSILKLTWTNPSIKSVIILKYNIQYRTKDASTWSQIPPEDTASTRSSFTVQDLKPFTEYVFRIRCMKEDGKGYWSDWSEEASGITYEDRPSKAPSFWYKIDPSHTQGYRTVQLVWKTLPPFEANGKILDYEVTLTRWKSHLQNYTVNATKLTVNLTNDRYLATLTVRNLVGKSDAAVLTIPACDFQATHPVMDLKAFPKDNMLWVEWTTPRESVKKYILEWCVLSDKAPCITDWQQEDGTVHRTYLRGNLAESKCYLITVTPVYADGPGSPESIKAYLKQAPPSKGPTVRTKKVGKNEAVLEWDQLPVDVQNGFIRNYTIFYRTIIGNETAVNVDSSHTEYTLSSLTSDTLYMVRMAAYTDEGGKDGPEFTFTTPKFAQGEIEAIVVPVCLAFLLTTLLGVLFCFNKRDLIKKHIWPNVPDPSKSHIAQWSPHTPPRHNFNSKDQMYSDGNFTDVSVVEIEANDKKPFPEDLKSLDLFKKEKINTEGHSSGIGGSSCMSSSRPSISSSDENESSQNTSSTVQYSTVVHSGYRHQVPSVQVFSRSESTQPLLDSEERPEDLQLVDHVDGGDGILPRQQYFKQNCSQHESSPDISHFERSKQVSSVNEEDFVRLKQQISDHISQSCGSGQMKMFQEVSAADAFGPGTEGQVERFETVGMEAATDEGMPKSYLPQTVRQGGYMPQ

SEQ ID NO: 69468 - protein, 130 aa, Homo sapiens
LHLSLLALGAAYVYAIPTEIPTSALVKETLALLSTHRTLLIANETLRIPVPVHKNHQLCTEEIFQGIGTLESQTVQGGTVERLFKNLSLIKKYIDGQKKKCGEERRRVNQFLDYLQEFLGVMNTEWIIES

SEQ ID NO: 69469 - protein, 27 aa, Homo sapiens
ILWALILQWEYQGILFLQMVFHTGTQR

SEQ ID NO: 69470 - protein, 14 aa, Homo sapiens
KDILFIFAVILMSP

SEQ ID NO: 69471 - protein, 34 aa, Homo sapiens
KVTLVLYSILTTAGALLSDTGLYFVLGLSEVRSA

SEQ ID NO: 69472 - protein, 331 aa, Homo sapiens
RPDTAQLDGTMAPAFLLLLLLWPQGCVSGPSADSVYTKVRLLEGETLSVQCSYKGYKNRVEGKVWCKIRKKKCEPGFARVWVKGPRYLLQDDAQAKVVNITMVALKLQDSGRYWCMRNTSGILYPLMGFQLDVSPAPQTERNIPFTHLDNILKSGTVTTGQAPTSGPDAPFTTGVMVFTPGLITLPRLLASTRPASKTGYSFTATSTTSQGPRRTMGSQTVTASPSNARDSSAGPESISTKSGDLSTRSPTTGLCLTSRSLLNRLPSMPSIRHQDVYSTVLGVVLTLLVLMLIMVYGFWKKRHMASYSMCSDPSTRDPPGRPEPYVEVYLI

SEQ ID NO: 69473 - protein, 1242 aa, Homo sapiens
LGLFYLPFLWFCGWTFTTKADSMGDQQLYKTNHVAHGSENLFYQQPPLGVHSGLNHNYGNAVTGGGMDAPQASPISPHFPQDTRDGLGLPVGSKNLGQMDTSRQGGWGSHAGPGNHVQLRGNLANSNMMWGAPAQAEPTDGYQYTYSQASEIRTQKLTSGVLHKLDSFTQVFANQNLRIQVNNMAQVLHTQSAVMDGAPDSALRQLLSQKPMEPPAPAIPSRYQQVPQQPHPGFTGGLSKPALQVGQHPTQGHLYYDYQQPLAQVPVQGGQPLQAPQMLSQHMQQMQQHQYYPPQQQQQAGQQRISMQEIQTQPQQIRPSQPQPPPQQQQPQQLQLQQRQGSMQIPQYYQPQPMMQHLQEQQQQQMHLQPPSYHRDPHQYTPEQAHTVQLIPLGSMSQYYYQEPQQPYSHPLYQQSHLSQHQQREDSQLKTYSSDRQAQAMLSSHGDLGPPDTGMGDPASSDLTRVSSTLPHRPLLSPSGIHLNNMGPQHQQLSPSAMWPQMHLPDGRAQPGSPESSGQPKGAFGEQFDAKNKLTCSICLKEFKNLPALNGHMRSHGGMRASPNLKQEEGEKVLPPQPQPPLPPPPPPPPPPQLPPEAESLTPMVMPVSVPVKLLPPKPSSQGFTNSTVAAPSARDKPASSMSDDEMPVLVRMTLSPPHSPQGAAPRTPAEIPRKHQPSVPKAEEPLKTVQEKKKFRHRPEPLFIPPPPSYNPNPAASYSGATLYQSQLRSPRVLGDHLLLDPTHELPPYTPPPMLSPVRQGSGLFSNVLISGHGPGAHPQLPLTPLTPTPRVLLCRSNSIDGSNVTVTPGPGEQTVDVEPRINIGLRFQAEIPELQDISALAQDTHKATLVWKPWPELENHDLQQRVENLLNLCCSSALPGGGTNSEFALHSLFEAKGDVMVALEMLLLRKPVRLKCHPLANYHYAGSDKWTSLERKLFNKALATYSKDFIFVQKMVKSKTVAQCVEYYYTWKKIMRLGRKHRTRLAEIIDDCVTSEEEEELEEEEEEDPEEDRKSTKEEESEVPKSPEPPPVPVLAPTEGPPLQALGQPSGSFICEMPNCGAVFSSRQALNGHARIHGGTNQVTKARGAIPSGKQKPGGTQSGYCSVKSSPSHSTTSGETDPTTIFPCKECGKVFFKIKSRNAHMKTHRQQEEQQRQKAQKAAFAAEMAATIERTTGPVGAPGLLPLDQLSLIKPIKDVDILDDDVVQQLGGVMEEAEVVDTDLLLDDQDSVLLQGDAEL

SEQ ID NO: 69474 - protein, 32 aa, Homo sapiens
MPLFLLAKIGFFLFPFLRSFLFVTEKVQSKFD

SEQ ID NO: 69475 - protein, 107 aa, Homo sapiens
LAYVPIIGWMWYFTEMVFCSRKWEQDRKTVATSLQHLRDYPEKYFFLIHCEGTRFTEKKHEISMQVARAKGLPRLKHHLLPRTKGFAITVRSLRNVEIMKIQHCWES

SEQ ID NO: 69476 - protein, 39 aa, Homo sapiens
IFYLLLVFPLLPQQSINKNKSQDFRLGSESMTHKELKKS

SEQ ID NO: 69477 - protein, 316 aa, Homo sapiens
IIVGSFMGYLRIFSPHPAKTGDGAQAEDLLLEVDLRDPVLQVEVGKFVSGTEMLHLAVLHSRKLCVYSVSGTLGNVEHGNQCQMKLMYEHNLQRTACNMTYGSFGGVKGRDLICIQSMDGMLMVFEQESYAFGRFLPGFLLPGPLAYSSRTDSFLTVSSCQQVESYKYQVLAFATDADKRQETEQQKLGSGKRLVVDWTLNIGEQALDICIVSFNQSASSVFVLGERNFFCLKDNGQIRFMKKLDWSPSCFLPYCSVSEGTINTLIGNHNNMLHIYQDVTLKWATQLPHIPVAVRVGCLQFSLWKHLLPRSSTLEK

SEQ ID NO: 69478 - protein, 31 aa, Homo sapiens
VRDPLLLRRGASTAAPWFLCGFLLLESGTLE

SEQ ID NO: 69479 - protein, 23 aa, Homo sapiens
LMILLLAYQLLHFHFQKMIRALK

SEQ ID NO: 69480 - protein, 305 aa, Homo sapiens
KAMGRPLLLPLLPLLLPPAFLQPSGSTGSGPSYLYGVTQPKHLSASMGGSVEIPFSFYYPWELATAPDVRISWRRGHFHRQSFYSTRPPSIHKDYVNRLFLNWTEGQKSGFLRISNLQKQDQSVYFCRVELDTRSSGRQQWQSIEGTKLSITQAVTTTTQRPSSMTTTWRLSSTTTTTGLRVTQGKRRSDSWHISLETAVGVAVAVTVLGIMILGLICLLRWRRRKGQQRTKATTPAREPFQNTEEPYENIRNEGQNTDPKLNPKDDGIVYASLALSSSTSPRAPPSHRPLKSPQNETLYSVLKA

SEQ ID NO: 69481 - protein, 713 aa, Homo sapiens
KKKAKMKDMPLRIHVLLGLAITTLVQAVDKKVDCPRLCTCEIRPWFTPRSIYMEASTVDCNDLGLLTFPARLPANTQILLLQTNNIAKIEYSTDFPVNLTGLDLSQNNLSSVTNINVKKMPQLLSVYLEENKLTELPEKCLSELSNLQELYINHNLLSTISPGAFIGLHNLLRLHLNSNRLQMINSKWFDALPNLEILMIGENPIIRIKDMNFKPLINLRSLVIAGINLTEIPDNALVGLENLESISFYDNRLIKVPHVALQKVVNLKFLDLNKNPINRIRRGDFSNMLHLKELGINNMPELISIDSLAVDNLPDLRKIEATNNPRLSYIHPNAFFRLPKLESLMLNSNALSALYHGTIESLPNLKEISIHSNPIRCDCVIRWMNMNKTNIRFMEPDSLFCVDPPEFQGQNVRQVHFRDMMEICLPLIAPESFPSNLNVEAGSYVSFHCRATAEPQPEIYWITPSGQKLLPNTLTDKFYVHSEGTLDINGVTPKEGGLYTCIATNLVGADLKSVMIKVDGSFPQDNNGSLNIKIRDIQANSVLVSWKASSKILKSSVKWTAFVKTENSHAAQSARIPSDVKVYNLTHLNPSTEYKICIDIPTIYQKNRKKCVNVTTKGLHPDQKEYEKNNTTTLMACLGGLLGIIGVICLISCLSPEMNCDGGHSYVRNYLQKPTFALGELYPPLINLWEAGKEKSTSLKVKATVIGLPTNMS

SEQ ID NO: 69482 - protein, 15 aa, Homo sapiens
VWLASPGVSTLLGLC

SEQ ID NO: 69483 - protein, 23 aa, Homo sapiens
ILEKNFTRLLTVPLKLLLCTHIS

SEQ ID NO: 69484 - protein, 31 aa, Homo sapiens
VKAVILKDSKVFPLLLCITLNGLCALGREHS

SEQ ID NO: 69485 - protein, 75 aa, Homo sapiens
RTAELPLVLLGRPPVGMGLSVLLPLCLLGPGRFTSGQKPLDTPGLGAAVLSVRKAGLKMRSHLTPSVCTVPSPGS

SEQ ID NO: 69486 - protein, 28 aa, Homo sapiens
LMKIHLCMVIFLNFMAQKEQEKQKCFIT

SEQ ID NO: 69487 - protein, 240 aa, Homo sapiens
VGDEVTVLFSVLACLLVLALAWVSTHTAEGGDPLPQPSGTPTPSQPSAAMAATDSMRGEAPGAETPSLRHRGQAAQPEPSTGFTATPPAPDSPQEPLVLRLKFLNDSEQVARAWPHDTIGSLKRTQFPGREQQVRLIYQGQLLGDDTQTLGSLHLPPNCVLHCHVSTRVGPPNPPCPPGSEPGPSGLEIGSLLLPLLLLLLLLLWYCQIQYRPFFPLTATLGLAGFTLLLSLLAFAMYRP

SEQ ID NO: 69488 - protein, 15 aa, Homo sapiens
MPLRQFLSFLIVVSF

SEQ ID NO: 69489 - protein, 487 aa, Homo sapiens
KSRVALKAQENLLLLVSMASPAAATYLVQSSACCPAIVRHLCQLYRSMPVFLDPADIATLEGISWRLPSAPSDEASFPGKEALAAFLGWFDYCDHLITEAHTVVADALAKAVAENFFVETLQPQLLHVSEQSILTSTALLTAMLRQLRSPALLREAVAFLLGTDRQPEAPGDNPHTLYAHLIGHCDHLSDEISITTLRLFEELLQKPHEGIIHSLVLRNLEGRPYVAWGSPEPESYEDTLDLEEDPYFTDSFLDSGFQTPAKPRLAPATSYDGKTAVTEIVNSFLCLVPEEAKTSAFLEETGYDTYVHDAYGLFQECSSRVASWGWPLTPTPLDPHEPERPFFEGHFLRVLFDRMSRILDQPYSLNLQVTSVLSRLALFPHPHIHEYLLDPYISLAPGCRSLFSVLVRVIGDLMQRIQRVPQFPGKLLLVRKQLTGQAPGEQLDHQTLLQGVVVLEEFCKELAAIAFVKFPPHDPRQNVSPAPEGQV

SEQ ID NO: 69490 - protein, 11 aa, Homo sapiens
MIVRTTSFLLL

SEQ ID NO: 69491 - protein, 98 aa, Homo sapiens
VTPAMRTLAILAAILLVALQAQAEPLQARADEVAAAPEQIAADIPEVVVSLAWDESLAPKHPGSRKNMACYCRIPACIAGERRYGTCIYQGRLWAFCC

SEQ ID NO: 69492 - protein, 98 aa, Homo sapiens; identical to SEQ ID NO: 69491

SEQ ID NO: 69493 - protein, 98 aa, Homo sapiens
VTPAMRTLAILAAILLVALQAQAEPLQARADEVAAAPEQIAADIPEVVVSLAWDESLAPKHPGSRKNMDCYCRIPACIAGERRYGTCIYQGRLWAFCC

SEQ ID NO: 69494 - protein, 94 aa, Homo sapiens
LGFIIAFILAFSVGANDVANSFGTAVGSGVVTLRQACILASIFETTGSVLLGAKVGETIRKGIIDVNLYNETVETLMAGEVSAMVGRDDDTTDS

SEQ ID NO: 69495 - protein, 65 aa, Homo sapiens
VWWGMVPLWTCCCWSCTWRMSAAVVGGPWRTCNAYPGPWALLPPSSSGKWQNECCSRSTGCRAQS

SEQ ID NO: 69496 - protein, 218 aa, Homo sapiens
LPLGALYTAAVAAFVLYKCLQGKDETAVLHEEASKQQPLQSEQQLAQLTQQLAQTEQHLNNLMAQLDPLFERVTTLAGAQQELLNMKLWTIHELLQDSKPDKDMEASEPGEGSGGESAGGGDKVSETGTFLISPHTEASRPLPEDFCLKEDEEEIGDSQAWEEPTNWSTETWNLATSWEVGRGLRRRCSQAVAKGPSHSLGWEGGTTAEGRLKQSLFS

SEQ ID NO: 69497 - protein, 17 aa, Homo sapiens
VMTRECVRWFSLIMMLT

SEQ ID NO: 69498 - protein, 853 aa, Homo sapiens
LLMALAVMFGTAMAFAPIPRITWEHREVHLVQFHEPDIYNYSALLLSEDKDTLYIGAREAVFAVNALNISEKQHEVYWKVSEDKKAKCAEKGKSKQTECLNYIRVLQPLSATSLYVCGTNAFQPACDHLNLTSFKFLGKNEDGKGRCPFDPAHSYTSVMVDGELYSGTSYNFLGSEPIISRNSSHSPLRTEYAIPWLNEPSFVFADVIRKSPDSPDGEDDRVYFFFTEVSVEYEFVFRVLIPRIARVCKGDQGGLRTLQKKWTSFLKARLICSRPDSGLVFNVLRDVFVLRSPGLKVPVFYALFTPQLNNVGLSAVCAYNLSTAEEVFSHGKYMQSTTVEQSHTKWVRYNGPVPKPRPGACIDSEARAANYTSSLNLPDKTLQFVKDHPLMDDSVTPIDNRPRLIKKDVNYTQIVVDRTQALDGTVYDVMFVSTDRGALHKAISLEHAVHIIEETQLFQDFEPVQTLLLSSKKGNRFVYAGSNSGVVQAPLAFCGKHGTCEDCVLARDPYCAWSPPTATCVALHQTESPSRGLIQEMSGDASVCPDKSKGSYRQHFFKHGGTAELKCSQKSNLARVFWKFQNGVLKAESPKYGLMGRKNLLIFNLSEGDSGVYQCLSEERVKNKTVFQVVAKHVLEVKVVPKPVVAPTLSVVQTEGSRIATKVLVASTQGSSPPTPAVQATSSGAITLPPKPAPTGTSCEPKIVINTVPQLHSEKTMYLKSSDNRLLMSLFLFFFVLFLCLFFYNCYKGYLPRQCLKFRSALLIGKKKPKSDFCDREQSLKETLVEPGSFSQQNGEHPKPALDTGYETEQDTITSKVPTDREDSQRIDDLSARDKPFDVKCELKFADSDADGD

SEQ ID NO: 69499 - protein, 33 aa, Homo sapiens
MFLLAVVLPSPLISWSFIEVRKKELHDFQDPAW

SEQ ID NO: 69500 - protein, 484 aa, Homo sapiens
VLVLLGVLSVCAASGHGSVAEREAGGEAEWAEPWDGAVFRPPSALGAVGVTRSSGTPRPGREEAGDLPVLLWWSPGLFPHFPGDSERIECARGACVASRNRRALRDSRTRALLFYGTDFRASAAPLPRLAHQSWALLHEESPLNNFLLSHGPGIRLFNLTSTFSRHSDYPLSLQWLPGTAYLRRPVPPPMERAEWRRRGYAPLLYLQSHCDVPADRDRYVRELMRHIPVDSYGKCLQNRELPTARLQDTATATTEDPELLAFLSRYKFHLALENAICNDYMTEKLWRPMHLGAVPVYRGSPSVRDWMPNNHSVILIDDFESPQKLAEFIDFLDKNDEEYMKYLAYKQPGGITNQFLLDSLKHREWGVNDPLLPNYLNGFECFVCDYELARLDAEKAHAASPGDSPVFEPHIAQPSHMDCPVPTPGFGNVEEIPENDSWKEMWLQDYWQGLDQGEALTAMIHNNETEQTKFWDYLHEIFMKRQHL

SEQ ID NO: 69501 - protein, 17 aa, Homo sapiens
MGSILSAIWMILNFLQS

SEQ ID NO: 69502 - protein, 367 aa, Homo sapiens
LRLLFLLTALRTDVRQQLFQELKGVRLLTDTLELTLGVTPEGNPPPTLLPSQETERAMEILKVLFNITLDSIKGEVDEEDAALYRHLGTLLRHCVMIATAGDRTEEFHGHAVNLLGNLPLKCLDVLLTLEPHGDSTEFMGVNMDVIRALLIFLEKRLHKTHRLKESVAPVLSVLTECARMHRPARKFLKAQVLPPLRDVRTRPEVGEMLRNKLVRLMTHLDTDVKRVAAEFLFVLCSESVPRFIKYTGYGNAAGLLAARGLMAGGRPEGQYSEDEDTDTDEYKEAKASINPVTGRVEEKPPNPMEGMTEEQKEHEAMKLVTMFDKLSRNRVIQPMGMSPRGHLTSLQDAMCETMEQQLSSDPDSDPD

SEQ ID NO: 69503 - protein, 17 aa, Homo sapiens
LGFIIPTSLSLLLACTS

SEQ ID NO: 69504 - protein, 944 aa, Homo sapiens
LPPCSGPGWLLSLSALLSVAARGAFATTHWVVTEDGKIQQQVDSPMNLKHPHDLVILMRQEATVNYLKELEKQLVAQKIHIEENEDRDTGLEQRHNKEDPDCIKAKVPLGDLDLYDGTYITLESKDISPEDYIDTESPVPPDPEQPDCTKILELPYSIHAFQHLRGVQERVNLSAPLLPKEDPIFTYLSKRLGRSIDDIGHLIHEGLQKNTSSWVLYNMASFYWRIKNEPYQVVECAMRALHFSSRHNKDIALVNLANVLHRAHFSADAAVVVHAALDDSDFFTSYYTLGNIYAMLGEYNHSVLCYDHALQARPGFEQAIKRKHAVLCQQKLEQKLEAQHRSLQRTLNELKEYQKQHDHYLRQQEILEKHKLIQEEQILRNIIHETQMAKEAQLGNHQICRLVNQQHSLHCQWDQPVRYHRGDIFENVDYVQFGEDSSTSSMMSVNFDVQSNQSDINDSVKSSPVAHSILWIWGRDSDAYRDKQHILWPKRADCTESYPRVPVGGELPTYFLPPENKGLRIHELSSDDYSTEEEAQTPDCSITDFRKSHTLSYLVKELEVRMDLKAKMPDDHARKILLSRINNYTIPEEEIGSFLFHAINKPNAPIWLILNEAGLYWRAVGNSTFAIACLQRALNLAPLQYQDVPLVNLANLLIHYGLHLDATKLLLQALAINSSEPLTFLSLGNAYLALKNISGALEAFRQALKLTTKCPECENSLKLIRCMQFYPFLYNITSSVCSGNCHEKTLDNSHDKQKYFDNSQSLDAAEEEPSERGTEEDPVFSVENSGRDSDALRLESTVVEESNGSDEMENSDETKMSEEILALVDEFQQAWPLEGFGGALEMKGRRLDLQGIRVLKKGPQDGVARSSCYGDCRSEDDEATEWITFQVKRVKKPKGDHKKTPGKKVETGQIENGHRYQANLEITGPKVASPGPQGLLDWKTRKVP

SEQ ID NO: 69505 - protein, 221 aa, Homo sapiens
IRMVLAYLFAQLSLWSRGVHGGLLVLGSANVDESLLGYLTKYDCSSADINPIGGISKTDLRAFVQFCIQRFQLPALQSILLAPATAELEPLADGQVSQTDEEDMGMTYAELSVYGKLRKVAKMGPYSMFCKLLGMWRHICTPRQVADKVKRFFSKYSMNRHKMTTLTPAYHAENYSPEDNRFDLRPFLYNTSWPWQFRCIENQVNPAEMFLSPCFMSVEET

SEQ ID NO: 69506 - protein, 16 aa, Homo sapiens
IIIRKCLFSTFKLFTL

SEQ ID NO: 69507 - protein, 25 aa, Homo sapiens
RHTSQFGIMHWFINLLVYCHPAAQI

SEQ ID NO: 69508 - protein, 55 aa, Homo sapiens
KKSSLLLLLLLLLLRVPASSCQGGQPASSRRGARELKESQFPQNWFLYCRTSQNL

SEQ ID NO: 69509 - protein, 756 aa, Homo sapiens
LLRLLLAWAAAGPTLGQDPWAAEPRAACGPSSCYALFPRRRTFLEAWRACRELGGDLATPRTPEEAQRVDSLVGAGPASRLLWIGLQRQARQCQLQRPLRGFTWTTGDQDTAFTNWAQPASGGPCPAQRCVALEASGEHRWLEGSCTLAVDGYLCQFGFEGACPALQDEAGQAGPAVYTTPFHLVSTEFEWLPFGSVAAVQCQAGRGASLLCVKQPEGGVGWSRAGPLCLGTGCSPDNGGCEHECVEEVDGHVSCRCTEGFRLAADGRSCEDPCAQAPCEQQCEPGGPQGYSCHCRLGFRPAEDDPHRCVDTDECQIAGVCQQMCVNYVGGFECYCSEGHELEADGISCSPAGAMGAQASQDLGDELLDDGEDEEDEDEAWKAFNGGWTEMPGILWMEPTQPPDFALAYRPSFPEDREPQIPYPEPTWPPPLSAPRVPYHSSVLSVTRPVVVSATHPTLPSAHQPPVIPATHPALSRDHQIPVIAANYPDLPSAYQPGILSVSHSAQPPAHQPPMISTKYPELFPAHQSPMFPDTRVAGTQTTTHLPGIPPNHAPLVTTLGAQLPPQAPDALVLRTQATQLPIIPTAQPSLTTTSRSPVSPAHQISVPAATQPAALPTLLPSQSPTNQTSPISPTHPHSKAPQIPREDGPSPKLALWLPSPAPTAAPTALGEAGLAEHSQRDDRWLLVALLVPTCVFLVVLLALGIVYCTRCGPHAPNKRITDCYRWVIHAGSKSPTEPMPPRGSLTGVQTCRTSV

SEQ ID NO: 69510 - protein, 39 aa, Homo sapiens
MFLFAVTVGSLILGYTRSRKVDKRSDPYHVYIKNRVSMI

SEQ ID NO: 69511 - protein, 1436 aa, Homo sapiens
IVVPAVVLIMLLPSDVARLVLGYLQQENLISTCQTFILESSDLKEYAEHCTDEGFIPACLLSLFGKNLTTILNEYVAMKTKETSNNVPAIMSSLWKKLDHTLSQIRSMQSSPRFAGSQRARTRTGIAEIKRQRKLASQTAPASAELLTLPYLSGQFTTPPSTGTQVTRPSGQISDPSRSYFVVVNHSQSQDTVTTGEALNVIPGAQEKKAHASLMSPGRRKSESQRKSTTLSGPHSTIRNFQDPNAFAVEKQMVIENAREKILSNKSLQEKLAENINKFLTSDNNIAQVPKQTDNNPTEPETSIDEFLGLPSEIHMSEEAIQDILEQTESDPAFQALFDLFDYGKTKNNKNISQSISSQPMESNPSIVLADETNLAVKGSFETEESDGQSGQPAFCTSYQNDDPLNALKNSNNHDVLRQEDQENFSQISTSIQKKAFKTAVPTEQKCDIDITFESVPNLNDFNQRGNSNAECNPHCAELYTNQMSTETEMAIGIEKNSLSSNVPSESQLQPDQPDIPITSFVSLGCEANNENLILSGKSSQLLSQDTSLTGKPSKKSQFCENSNDTVKLKINFHGSKSSDSSEVHKSKIEINVLEPVMSQLSNCQDNSCLQSEILPVSVESSHLNVSGQVEIHLGDSLSSTKQPSNDSASVELNHTENEAQASKSENSQEPSSSVKEENTIFLSLGGNANCEKVALTPPEGTPVENSHSLPPESVCSSVGDSHPESQNTDDKPSSNNSAEIDASNIVSLKVIISDDPFVSSDTELTSAVSSINGENLPTIILSSPTKSPTKNAELVKCLSSEETVGAVVYAEVGDSASMEQSLLTFKSEDSAVNNTQNEDGIAFSANVTPCVSKDGGYIQLMPATSTAFGNSNNILIATCVTDPTALGTSVSQSNVVVLPGNSAPMTAQPLPPQLQTPPRSNSVFAVNQAVSPNFSQGSAIIIASPVQPVLQGMVGMIPVSVVGQNGNNFSTPPRQVLHMPLTAPVCNRSIPQFPVPPKSQKAQGLRNKPCIGKQVNNLVDSSGHSVGCHAQKTEVSDKSIATDLGKKSEETTVPFPEESIVPAAKPCHRRVLCFDSTTAPVANTQGPNHKMVSQNKERNAVSFPNLDSPNVSSTLKPPSNNAIKREKEKPPLPKILSKSESAISRHTTIRETQSEKKVSPTEIVLESFHKATANKENELCSDVERQKNPENSKLSIGQQNGGLRSEKSIASLQEMTKKQGTSSNNKNVLSVGTAVKDLKQEQTKSASSLITTEMLQDIQRHSSVSRLADSSDLPVPRTPGSGAGEKHKEEPIDIIKAPSSRRFSEDSSTSKVMVPPVTPDLPACSPASETGSENSVNMAAHTLMILSRAAISRTTSATPLKDNTQQFRASSRSTTKKRKIEELDERERNSRPSSKNLTNSSIPMKKKKIKKKKLPSSFPAGMDVDKFLLSLHYDE

SEQ ID NO: 69512 - protein, 1451 aa, Homo sapiens
IASSSILQFKMATAAAAAAVMAPPGCPGSCPNFAVVCSFLERYGPLLDLPELPFPELERVLQAPPPDVGNGEVPKELVELHLKLMRKIGKSVTADRWEKYLIKICQEFNSTWAWEMEKKGYLEMSVECKLALLKYLCECQFDDNLKFKNIINEEDADTMRLQPIGRDKDGLMYWYQLDQDHNVRMYIEEQDDQDGSSWKCIVRNRNELAETLALLKAQIDPVLLKNSSQQDNSSRESPSLEDEETKKEEETPKQEEQKESEKMKSEEQPMDLENRSTANVLEETTVKKEKEDEKELVKLPVIVKLEKPLPENEEKKIIKEESDSFKENVKPIKVEVKECRADPKDTKSSMEKPVAQEPERIEFGGNIKSSHEITEKSTEETEKLKNDQQAKIPLKKREIKLSDDFDSPVKGPLCKSVTPTKEFLKDEIKQEEETCKRISTITALGHEGKQLVNGEVSDERVAPNFKTEPIETKFYETKEESYSPSKDRNIITEGNGTESLNSVITSMKTGELEKETAPLRKDADSSISVLEIHSQKAQIEEPDPPEMETSLDSSEMAKDLSSKTALSSTESCTMKGEEKSPKTKKDKRPPILECLEKLEKSKKTFLDKDAQRLSPIPEEVPKSTLESEKPGSPEAAETSPPSNIIDHCEKLASEKEVVECQSTSTVGGQSVKKVDLETLKEDSEFTKVEMDNLDNAQTSGIEEPSETKGSMQKSKFKYKLVPEEETTASENTEITSERQKEGIKLTIRISSRKKKPDSPPKVLEPENKQEKTEKEEEKTNVGRTLRRSPRISRPTAKVAEIRDQKADKKRGEGEDEVEEESTALQKTDKKEILKKSEKDTNSKVSKVKPKGKVRWTGSRTRGRWKYSSNDESEGSGSEKSSAASEEEEEKESEEAILADDDEPCKKCGLPNHPELILLCDSCDSGYHTACLRPPLMIIPDGEWFCPPCQHKLLCEKLEEQLQDLDVALKKKERAERRKERLVYVGISIENIIPPQEPDFSEDQEEKKKDSKKSKANLLERRSTRTRKCISYRFDEFDEAIDEAIEDDIKEADGGGVGRGKDISTITGHRGKDISTILDEERKENKRPQRAAAARRKKRRRLNDLDSDSNLDEEESEDEFKISDGSQDEFVVSDENPDESEEDPPSNDDSDTDFCSRRLRRHPSRPMRQSRRLRRKTPKKKYSDDDEEEESEENSRDSESDFSDDFSDDFVETRRRRSRRNQKRQINYKEDSESDGSQKSLRRGKEIRRVHKRRLSSSESEESYLSKNSEDDELAKESKRSVRKRGRSTDEYSEADEEEEEEEGKPSRKRLHRIETDEEESCDNAHGDANQPARDSQPRVLPSEQESTKKPYRIESDEEEDFENVGKVGSPLDYSLVDLPSTNGQSPGKAIENLIGKPTEKSQTPKDNSTASASLASNGTSGGQEAGAPEEEEDELLRVTDLVDYVCNSEQL

SEQ ID NO: 69513 - protein, 14 aa, Homo sapiens
RYFMPTFSFLLRLF

SEQ ID NO: 69514 - protein, 185 aa, Homo sapiens
LKLSCAGIILLVLVVTGLSVSVTSLIQKSSIEKCSVDIQQSRNKTTERPGLLNCPIYWQQLREKCLLFSHTVNPWNNSLADCSTKESSLLLIRDKDELIHTQNLIRDKAILFWIGLNFSLSEKNWKWINGSFLNSNDLEIRGDAKENSCISISQTSVYSEYCSTEIRWICQKELTPVRNKVYPDS

SEQ ID NO: 69515 - protein, 11 aa, Homo sapiens
IAFSLILSLLR

SEQ ID NO: 69516 - protein, 27 aa, Homo sapiens
KSRVCLLIMRIKSCLFNMCFVLLPLQQ

SEQ ID NO: 69517 - protein, 22 aa, Homo sapiens
LAYILLFLDFFLIKRLLQCLSC

SEQ ID NO: 69518 - protein, 15 aa, Homo sapiens
LLFLLRASELLLFLG

SEQ ID NO: 69519 - protein, 17 aa, Homo sapiens
KPSLFLFLVSLLHIFFK

SEQ ID NO: 69520 - protein, 167 aa, Homo sapiens
TMKYTSYILAFQLCIVLGSLGCYCQDPYVKEAENLKKYFNAGHSDVADNGTLFLGILKNWKEESDRKIMQSQIVSFYFKLFKNFKDDQSIQKSVETIKEDMNVKFFNSNKKKRDDFEKLTNYSVTDLNVQRKAIHELIQVMAELSPAAKTGKRKRSQMLFRGRRASQ

SEQ ID NO: 69521 - protein, 188 aa, Homo sapiens
VLALVFGLSLVYFLSSTFKQEERAVRDRNLLQVHDHNQPIPWKVQFNLGNSSRPSNQCRNSIQGKHLITDELGYVCERKDLLVNGCCNVNVPSTKQYCCDGCWPNGCCSAYEYCVSCCLQPNKQLLLERFLNRAAVAFQNLFMAVEDHFELCLAKCRTSSQSVQHENTYRDPIAKYCYGESPPELFPA

SEQ ID NO: 69522 - protein, 801 aa, Homo sapiens
ISGMVALPMVLVLLLVLSRGESELDAKIPSTGDATEWRNPHLSMLGSCQPAPSCQKCILSHPSCAWCKQLNFTASGEAEARRCARREELLARGCPLEELEEPRGQQEVLQDQPLSQGARGEGATQLAPQRVRVTLRPGEPQQLQVRFLRAEGYPVDLYYLMDLSYSMKDDLERVRQLGHALLVRLQEVTHSVRIGFGSFVDKTVLPFVSTVPSKLRHPCPTRLERCQSPFSFHHVLSLTGDAQAFEREVGRQSVSGNLDSPEGGFDAILQAALCQEQIGWRNVSRLLVFTSDDTFHTAGDGKLGGIFMPSDGHCHLDSNGLYSRSTEFDYPSVGQVAQALSAANIQPIFAVTSAALPVYQELSKLIPKSAVGELSEDSSNVVQLIMDAYNSLSSTVTLEHSSLPPGVHISYESQCEGPEKREGKAEDRGQCNHVRINQTVTFWVSLQATHCLPEPHLLRLRALGFSEELIVELHTLCDCNCSDTQPQAPHCSDGQGHLQCGVCSCAPGRLGRLCECSVAELSSPDLESGCRAPNGTGPLCSGKGHCQCGRCSCSGQSSGHLCECDDASCERHEGILCGGFGRCQCGVCHCHANRTGRACECSGDMDSCISPEGGLCSGHGRCKCNRCQCLDGYYGALCDQCPGCKTPCERHRDCAECGAFRTGPLATNCSTACAHTNVTLALAPILDDGWCKERTLDNQLFFFLVEDDARGTVVLRVRPQEKGADHTQAIVLGCVGGIVAVGLGLVLAYRLSVEIYDRREYSRFEKEQQQLNWKQDSNPLYKSAITTTINPRFQEADSPTL

SEQ ID NO: 69523 - protein, 22 aa, Homo sapiens
LSLWVALLWRSTVTVTESAHSV

SEQ ID NO: 69524 - protein, 19 aa, Homo sapiens
IYLRQILSFFLSPIFSGSL

SEQ ID NO: 69525 - protein, 61 aa, Homo sapiens
LNFPVPLLGCLLFRCPFAPQTTSWSALSSVAGSGDGAPGRRPKSRVRGPLHHPPGPTPGPR

SEQ ID NO: 69526 - protein, 10 aa, Homo sapiens
IYLIVWSMFF

SEQ ID NO: 69527 - protein, 442 aa, Homo sapiens
TGMGGLRLLAVALTCCWWPQGSQGKTLRGSFSSTAAQDAQGQRIGHFEFHGDHALLCVRINNIAVAVGKEAKLYLFQAQEWLKLQQSSHGYSCSEKLSKAQLTMTMNQTEHNLTVSQIPSPQTWHVFYADKYTCQDDKENSQVEDIPFEMVLLNPDAEGNPFDHFSAGESGLHEFFFLLVLVYFVIACIYAQSLWQAIKKGGPMHMILKVLTTALLLQAGSALANYIHFSSYSKDGIGVPFMGSLAEFFDIASQIQMLYLLLSLCMGWTIVRMKKSQSRPLQWDSTPASTGIAVFIVMTQSVLLLWEQFEDISHHSYHSHHNLAGILLIVLRICLALSLGCGLYQIITVERSTLKREFYITFAKGCILWFLCHPVLACISVIFSDYQRDKVITIGVILCQSVSMVILYRLFLSHSLYWEVSSLSSVTLPLTISSGHKSRPHF

SEQ ID NO: 69528 - protein, 29 aa, Homo sapiens
IPHCSWVVMGWCLLTFSLSLPTVLIDNFK

SEQ ID NO: 69529 - protein, 7 aa, Homo sapiens
RLVLFVI

SEQ ID NO: 69530 - protein, 22 aa, Homo sapiens
IVKIKLKKIMYVLVMMSLKVYE

SEQ ID NO: 69531 - protein, 20 aa, Homo sapiens
IVMWSCTSWFQILALPLIPG

SEQ ID NO: 69532 - protein, 13 aa, Homo sapiens
RGFTMLAMVVSIS

SEQ ID NO: 69533 - protein, 13 aa, Homo sapiens
RYFLLLFFLFEFL

SEQ ID NO: 69534 - protein, 27 aa, Homo sapiens
LSGYPDKSGLVFLMLPLLVLSSLSAKC

SEQ ID NO: 69535 - protein, 10 aa, Homo sapiens
LFFFIIYSLP

SEQ ID NO: 69536 - protein, 68 aa, Homo sapiens
LTLLLIQIIFLALGKISFIFVCCKDGFARISHDQDKLPIQKPTDTNYIMRKKCIQLGHISFELFGLKA

SEQ ID NO: 69537 - protein, 639 aa, Homo sapiens
LALRVVAGLAAAALVAMLLEHYGLAGQPSPLPRPAPPRRPHPAPGPGDSNIFWGLQISDIHLSRFRDPGRAVDLEKFCSETIDIIQPALVLATGDLTDAKTKEQLGSRQHEVEWQTYQGILKKTRVMEKTKWLDIKGNHDAFNIPSLDSIKNYYRKYSAVRRDGSFHYVHSTPFGNYSFICVDATVNPGPKRPYNFFGILDKKKMEELLLLAKESSRSNHTIWFGHFTTSTILSPSPGIRSIMSSAIAYLCGHLHTLGGLMPVLHTRHFQGTLELEVGDWKDNRRYRIFAFDHDLFSFADLIFGKWPVVLITNPKSLLYSCGEHEPLERLLHSTHIRVLAFSLSSITSVTVKIDGVHLGQAVHVSGPIFVLKWNPRNYSSGTHNIEVIVQDSAGRSKSVHHIFSVQENNHLSFDPLASFILRTDHYIMARVLFVLIVLSQLTILIIFRYRGYPELKEPSGFINLTSFSLHVLSKINIFYYSVLLLTLYTVLGPWFFGEIIDGKFGCCFSFGIFVNGHFLQGSITFIIGILQLAFFNIPLMAYMCWSLLQRCFGHNFRSHLHQRKYLKIMPVHLLMLLLYIWQVYSCYFLYATYGTLAFLFSPLRTWLTLLTPVLIRYVWTLNSTKFGIFMVQLKSHLSS

SEQ ID NO: 69538 - protein, 80 aa, Homo sapiens
VWSFGILLWETFSLGASPYPNLSNQQTREFVEKGGRLPCPELCPDAVFRLMEQCWAYEPGQRPSFSTIYQELQSIRKRHR

SEQ ID NO: 69539 - protein, 57 aa, Homo sapiens
VLPVQLFFVWIIMQQLLKPSSFIRLMQNSVILIPPRKEQAQLTLRTRKVPPTTPALR

SEQ ID NO: 69540 - protein, 790 aa, Homo sapiens
LLGLVLGFVLASRLVLPRASELKRAGPRRRASPEGCRSGQAAASQAGGARGDARGAQLWPPGSDPDGGPRDRNFLFVGVMTAQKYLQTRAVAAYRTWSKTIPGKVQFFSSEGSDTSVPIPVVPLRGVDDSYPPQKKSFMMLKYMHDHYLDKYEWFMRADDDVYIKGDRLENFLRSLNSSEPLFLGQTGLGTTEEMGKLALEPGENFCMGGPGVIMSREVLRRMVPHIGKCLREMYTTHEDVEVGRCVRRFAGVQCVWSYEMQQLFYENYEQNKKGYIRDLHNSKIHQAITLHPNKNPPYQYRLHSYMLSRKISELRHRTIQLHREIVLMSKYSNTEIHKEDLQLGIPPSFMRFQPRQREEILEWEFLTGKYLYSAVDGQPPRRGMDSAQREALDDIVMQVMEMINANAKTRGRIIDFKEIQYGYRRVNPMYGAEYILDLLLLYKKHKGKKMTVPVRRHAYLQQTFSKIQFVEHEELDAQELAKRINQESGSLSFLSNSLKKLVPFQLPGSKSEHKEPKDKKINILIPLSGRFDMFVRFMGNFEKTCLIPNQNVKLVVLLFNSDSNPDKAKQVELMRDYRIKYPKADMQILPVSGEFSRALALEVGSSQFNNESLLFFCDVDLVFTTEFLQRCRANTVLGQQIYFPIIFSQYDPKIVYSGKVPSDNHFAFTQKTGFWRNYGFGITCIYKGDLVRVGGFDVSIQGWGLEDVDLFNKVVQAGLKTFRSQEVGVVHVHHPVFCDPNLDPKQYKMCLGSKASTYGSTQQLAEMWLEKNDPSYSKSSNNNGSVRTA

SEQ ID NO: 69541 - protein, 51 aa, Homo sapiens
KTEIAHSVLYLASPLASYVTGAVLVADGGAWLTFPNGVKGLPDFASFSAKL

SEQ ID NO: 69542 - protein, 542 aa, Homo sapiens
VGVSMPRGWAAPLLLLLLQGGWGCPDLVCYTDYLQTVICILEMWNLHPSTLTLTWQDQYEELKDEATSCSLHRSAHNATHATYTCHMDVFHFMADDIFSVNITDQSGNYSQECGSFLLAESIKPAPPFNVTVTFSGQYNISWRSDYEDPAFYMLKGKLQYELQYRNRGDPWAVSPRRKLISVDSRSVSLLPLEFRKDSSYELQVRAGPMPGSSYQGTWSEWSDPVIFQTQSEELKEGWNPHLLLLLLLVIVFIPAFWSLKTHPLWRLWKKIWAVPSPERFFMPLYKGCSGDFKKWVGAPFTGSSLELGPWSPEVPSTLEVYSCHPPRSPAKRLQLTELQEPAELVESDGVPKPSFWPTAQNSGGSAYSEERDRPYGLVSIDTVTVLDAEGPCTWPCSCEDDGYPALDLDAGLEPSPGLEDPLLDAGTTVLSCGCVSAGSPGLGGPLGSLLDRLKPPLADGEDWAGGLPWGGRSPGGVSESEAGSPLAGLDMDTFDSGFVGSDCSSPVECDFTSPGDEGPPRSYLRQWVVIPPPLSSPGPQAS

SEQ ID NO: 69543 - protein, 1209 aa, Homo sapiens
VVTAAVVLLLSGVGPAHGSEDIVVGCGGFVKSDVEINYSLIEIKLYTKHGTLKYQTDCAPNNGYFMIPLYDKGDFILKIEPPLGWSFEPTTVELHVDGVSDICTKGGDINFVFTGFSVNGKVLSKGQPLGPAGVQVSLRNTGTEAKIQSTVTQPGGKFAFFKVLPGDYEILATHPTWALKEASTTVRVTNSNANAASPLIVAGYNVSGSVRSDGEPMKGVKFLLFSSLVTKEDVLGCNVSPVPGFQPQDESLVYLCYTVSREDGSFSFYSLPSGGYTVIPFYRGERITFDVAPSRLDFTVEHDSLKIEPVFHVMGFSVTGRVLNGPEGDGVPEAVVTLNNQIKVKTKADGSFRLENITTGTYTIHAQKEHLYFETVTIKIAPNTPQLADIIATGFSVCGQISIIRFPDTVKQMNKYKVVLSSQDKDKSLVTVETDAHGSFCFKAKPGTYKVQVMVPEAETRAGLTLKPQTFPLTVTNRPMMDVAFVQFLASVSGKVSCLDTCGDLLVTLQSLSRQGEKRSLQLSGKVNAMTFTFDNVLPGKYKISIMHEDWCWKNKSLEVEVLEDDMSAVEFRQTGYMLRCSLSHAITLEFYQDGNGRENVGIYNLSKGVNRFCLSKPGVYKVTPRSCHRFEQAFYTYDTSSPSILTLTAIRHHVLGTITTDKMMDVTVTIKSSIDSEPALVLGPLKSVQELRREQQLAEIEARRQEREKNGNEEGEERMTKPPVQEMVDELQGPFSYDFSYWARSGEKITVTPSSKELLFYPPSMEAVVSGESCPGKLIEIHGKAGLFLEGQIHPELEGVEIVISEKGASSPLITVFTDDKGAYSVGPLHSDLEYTVTSQKEGYVLTAVEGTIGDFKAYALAGVSFEIKAEDDQPLPGVLLSLSGGLFRSNLLTQDNGILTFSNLSPGQYYFKPMMKEFRFEPSSQMIEVQEGQNLKITITGYRTAYSCYGTVSSLNGEPEQGVAMEAVGQNDCSIYGEDTVTDEEGKFRLRGLLPGCVYHVQLKAEGNDHIERALPHHRVIEVGNNDIDDVNIIVFRQINQFDLSGNVITSSEYLPTLWVKLYKSENLDNPIQTVSLGQSLFFHFPPLLRDGENYVVLLDSTLPRSQYDYILPQVSFTAVGYHKHITLIFNPTRKLPEQDIAQGSYIALPLTLLVLLAGYNHDKLIPLLLQLTSRLQGVRALGQAASDNSGPEDAKRQAKKQKTRRT

SEQ ID NO: 69544 - protein, 1209 aa, Homo sapiens
VVTAAVVLLLSGVGPAHGSEDIVVGCGGFVKSDVEINYSLIEIKLYTKHGTLKYQTDCAPNNGYFMIPLYDKGDFILKIEPPLGWSFEPTTVELHVDGVSDICTKGGDINFVFTGFSVNGKVLSKGQPLGPAGVQVSLRNTGTEAKIQSTVTQPGGKFAFFKVLPGDYEILATHPTWALKEASTTVRVTNSNANAASPLIVAGYNVSGSVRSDGEPMKGVKFLLFSSLVTKEDVLGCNVSPVPGFQPQDESLVYLCYTVSREDGSFSFYSLPSGGYTVIPFYRGERITFDVAPSRLDFTVEHDSLKIEPVFHVMGFSVTGRVLNGPEGDGVPEAVVTLNNQIKVKTKADGSFRLENITTGTYTIHAQKEHLYFETVTIKIAPNTPQLADIVATGFSVCGQISIIRFPDTVKQMNKYKVVLSSQDKDKSLVTVETDAHGSFCFKANPGTYKVQVMVPEAETRAGLTLKPQTFPLTVTDRPVMDVAFVQFLASVSGKVSCLDTCGDLLVTLQSLSRQGEKRSLQLSGKVNAMTFTFDNVLPGKYKISIMHEDWCWKNKSLEVEVLEDDVSAVEFRQTGYMLRCSLSHAITLEFYQDGNGRENVGIYNLSKGVNRFCLSKPGVYKVTPRSCHRFEQAFYTYDTSSPSILTLTAIRHHVLGTITTDKMMDVTVTIKSSIDSEPALVLGPLKSVQELRREQQLAEIEARRQEREKNGNEEGEERMTKPPVQEMVDELQGPFSYDFSYWARSGEKITVTPSSKELLFYPPSMEAVVSGESCPGKLIEIHGKAGLFLEGQIHPELEGVEIVISEKGASSPLITVFTDDKGAYSVGPLHSDLEYTVTSQKEGYVLTAVEGTIGDFKAYALAGVSFEIKAEDDQPLPGVLLSLSGGLFRSNLLTQDNGILTFSNLSPGQYYFKPMMKEFRFEPSSQMIEVQEGQNLKITITGYRTAYSCYGTVSSLNGEPEQGVAMEAVGQNDCSIYGEDTVTDEEGKFRLRGLLPGCVYHVQLKAEGNDHIERALPHHRVIEVGNNDIDDVNIIVFRQINQFDLSGNVITSSEYLPTLWVKLYKSENLDNPIQTVSLGQSLFFHFPPLLRDGENYVVLLDSTLPRSQYDYILPQVSFTAVGYHKHITLIFNPTRKLPEQDIAQGSYIALPLTLLVLLAGYNHDKLIPLLLQLTSRLQGVGALGQAASDNSGPEDAKRQAKKQKTRRT

SEQ ID NO: 69545 - protein, 15 aa, Homo sapiens
MALVLTAFTVSFMGS

SEQ ID NO: 69546 - protein, 50 aa, Homo sapiens
LWPRQLKPGLLMLPRLVLELLGSSDPPASAFGVVTGLKISFFAEGTHLLV

SEQ ID NO: 69547 - protein, 44 aa, Homo sapiens
IYLNGYKVHVISLRSFLLMCCSSSWLVKTIRVIQGLETERSTAK

SEQ ID NO: 69548 - protein, 258 aa, Homo sapiens
LLALWALAAVALPGSGAEGDGGWRPGGPGAVAEEERCTVERRADLTYAEFVQQYAFVRPVILQGLTDNSRFRALCSRDRLLASFGDRVVRLSTANTYSYHKVDLPFQEYVEQLLHPQDPTSLGNDTLYFFGDNNFTEWASLFRHYSPPPFGLLGTAPAYSFGIAGAGSGVPFHWHGPGYSEVIYGRKRWFLYPPEKTPEFHPNKTTLAWLRDTYPALPPSARPLECTIRAGEVLYFPDRWWHATLNLDTSVFISTFLG

SEQ ID NO: 69549 - protein, 15 aa, Homo sapiens
VLLLELLTVCLLGSL

SEQ ID NO: 69550 - protein, 13 aa, Homo sapiens
ILRLLEITLLMTS

SEQ ID NO: 69551 - protein, 43 aa, Homo sapiens
TARSFFSALVRFLFGFLPASGATRVARQQPLGDLVLGSCPAWG

SEQ ID NO: 69552 - protein, 1054 aa, Homo sapiens
VTMKLVNIWLLLLVVLLCGKKHLGDRLEKKSFEKAPCPGCSHLTLKVEFSSTVVEYEYIVAFNGYFTAKARNSFISSALKSSEVDNWRIIPRNNPSSDYPSDFEVIQIKEKQKAGLLTLEDHPNIKRVTPQRKVFRSLKYAESDPTVPCNETRWSQKWQSSRPLRRASLSLGSGFWHATGRHSSRRLLRAIPRQVAQTLQADVLWQMGYTGANVRVAVFDTGLSEKHPHFKNVKERTNWTNERTLDDGLGHGTFVAGVIASMRECQGFAPDAELHIFRVFTNNQVSYTSWFLDAFNYAILKKIDVLNLSIGGPDFMDHPFVDKVWELTANNVIMVSAIGNDGPLYGTLNNPADQMDVIGVGGIDFEDNIARFSSRGMTTWELPGGYGRMKPDIVTYGAGVRGSGVKGGCRALSGTSVASPVVAGAVTLLVSTVQKRELVNPASMKQALIASARRLPGVNMFEQGHGKLDLLRAYQILNSYKPQASLSPSYIDLTECPYMWPYCSQPIYYGGMPTVVNVTILNGMGVTGRIVDKPDWQPYLPQNGDNIEVAFSYSSVLWPWSGYLAISISVTKKAASWEGIAQGHVMITVASPAETESKNGAEQTSTVKLPIKVKIIPTPPRSKRVLWDQYHNLRYPPGYFPRDNLRMKNDPLDWNGDHIHTNFRDMYQHLRSMGYFVEVLGAPFTCFDASQYGTLLMVDSEEEYFPEEIAKLRRDVDNGLSLVIFSDWYNTSVMRKVKFYDENTRQWWMPDTGGANIPALNELLSVWNMGFSDGLYEGEFTLANHDMYYASGCSIAKFPEDGVVITQTFKDQGLEVLKQETAVVENVPILGLYQIPAEGGGRIVLYGDSNCLDDSHRQKDCFWLLDALLQYTSYGVTPPSLSHSGNRQRPPSGAGSVTPERMEGNHLHRYSKVLEAHLGDPKPRPLPACPRLSWAKPQPLNETAPSNLWKHQKLLSIDLDKVVLPNFRSNRPQVRPLSPGESGAWDIPGGIMPGRYNQEVGQTIPVFAFLGAMVVLAFFVVQINKAKSRPKRRKPRVKRPQLMQQVHPPKTPSV

SEQ ID NO: 69553 - protein, 1204 aa, Homo sapiens
KMAACGRVRRMFRLSAALHLLLLFAAGAEKLPGQGVHSQGQGPGANFVSFVGQAGGGGPAGQQLPQLPQSSQLQQQQQQQQQQQQPQPPQPPFPAGGPPARRGGAGAGGGWKLAEEESCREDVTRVCPKHTWSNNLAVLECLQDVREPENEISSDCNHLLWNYKLNLTTDPKFESVAREVCKSTITEIKECADEPVGKGYMVSCLVDHRGNITEYQCHQYITKMTAIIFSDYRLICGFMDDCKNDINILKCGSIRLGEKDAHSQGEVVSCLEKGLVKEAEEREPKIQVSELCKKAILRVAELSSDDFHLDRHLYFACRDDRERFCENTQAGEGRVYKCLFNHKFEESMSEKCREALTTRQKLIAQDYKVSYSLAKSCKSDLKKYRCNVENLPRSREARLSYLLMCLESAVHRGRQVSSECQGEMLDYRRMLMEDFSLSPEIILSCRGEIEHHCSGLHRKGRTLHCLMKVVRGEKGNLGMNCQQALQTLIQETDPGADYRIDRALNEACESVIQTACKHIRSGDPMILSCLMEHLYTEKMVEDCEHRLLELQYFISRDWKLDPVLYRKCQGDASRLCHTHGWNETSEFMPQGAVFSCLYRHAYRTEEQGRRLSRECRAEVQRILHQRAMDVKLDPALQDKCLIDLGKWCSEKTETGQELECLQDHLDDLVVECRDIVGNLTELESEDIQIEALLMRACEPIIQNFCHDVADNQIDSGDLMECLIQNKHQKDMNEKCAIGVTHFQLVQMKDFRFSYKFKMACKEDVLKLCPNIKKKVDVVICLSTTVRNDTLQEAKEHRVSLKCRRQLRVEELEMTEDIRLEPDLYEACKSDIKNFCSAVQYGNAQIIECLKENKKQLSTRCHQKVFKLQETEMMDPELDYTLMRVCKQMIKRFCPEADSKTMLQCLKQNKNSELMDPKCKQMITKRQITQNTDYRLNPMLRKACKADIPKFCHGILTKAKDDSELEGQVISCLKLRYADQRLSSDCEDQIRIIIQESALDYRLDPQLQLHCSDEISSLCAEEAAAQEQTGQVEECLKVNLLKIKTELCKKEVLNMLKESKADIFVDPVLHTACALDIKHHCAAITPGRGRQMSCLMEALEDKRVRLQPECKKRLNDRIEMWSYAAKVAPADGFSDLAMQVMTSPSKNYILSVISGSICILFLIGLMCGRITKRVTRELKDRLQYRSETMAYKGLVWSQDVTGSPA

SEQ ID NO: 69554 - protein, 10 aa, Homo sapiens
LFLALSLGLT

SEQ ID NO: 69555 - protein, 723 aa, Homo sapiens
KRLAGGAVGWVLLVRGVHSVRAGGGRPPRAADMKKDVRILLVGEPRVGKTSLIMSLVSEEFPEEVPPRAEEITIPADVTPERVPTHIVDYSEAEQSDEQLHQEISQANVICIVYAVNNKHSIDKVTSRWIPLINERTDKDSRLPLILVGNKSDLVEYSSMETILPIMNQYTEIETCVECSAKNLKNISELFYYAQKAVLHPTGPLYCPEEKEMKPACIKALTRIFKISDQDNDGTLNDAELNFFQRICFNTPLAPQALEDVKNVVRKHISDGVADSGLTLKGFLFLHTLFIQRGRHETTWTVLRRFGYDDDLDLTPEYLFPLLKIPPDCTTELNHHAYLFLQSTFDKHDLDRDCALSPDELKDLFKVFPYIPWGPDVNNTVCTNERGWITYQGFLSQWTLTTYLDVQRCLEYLGYLGYSILTEQESQASAVTVTRDKKIDLQKKQTQRNVFRCNVIGVKNCGKSGVLQALLGRNLMRQKKIREDHKSYYAINTVYVYGQEKYLLLHDISESEFLTEAEIICDVVCLVYDVSNPKSFEYCARIFKQHFMDSRIPCLIVAAKSDLHEVKQEYSISPTDFCRKHKMPPPQAFTCNTADAPSKDIFVKLTTMAMYPEDHYRDRLSRDMGHTDRIENLRKIWVFLKTAFHARLRCMCTCNRCTFCICQNFLNSDLLQSVKNKIFTAVLNRHVTQADLKSSTFWLRASFGATVFAVLGFAMYKALLKQR

SEQ ID NO: 69556 - protein, 20 aa, Homo sapiens
MDYHWLGRLIHRPAWLPLLL

SEQ ID NO: 69557 - protein, 40 aa, Homo sapiens
IVILVILFKCGFFKRKYQQLNLESIRKAQLKSENLLEEEN

SEQ ID NO: 69558 - protein, 104 aa, Homo sapiens
KAQARPEDMQIITTALVCLLLAGMWPEDVDSKSMQVPFSRCCFSFAEQEIPLRAILCYRNTSSICSNEGLIFKLKRGKEACALDTVGWVQRHRKMLRHCPSKRK

SEQ ID NO: 69559 - protein, 458 aa, Homo sapiens
ILAVLALLGLLGPRLRGPWGRAVGERTLPGAQDRDDGEEADGGGPADQFSDGREPLPGGCSLVCKPSALAQCLLRALRRSEALEAGPRSWFSGPHLQTLCHFVLPVAPGPELAREYLQLADDGLVALDWVVGPCVRGRRITSAGGLPAVLLVIPNAWGRLTRNVLGLCLLALERGYYPVIFHRRGHHGCPLVSPRLQPFGDPSDLKEAVTYIRFRHPAAPLFAVSEGSGSALLLSYLGECGSSSYVTGAACISPVLRCREWFEAGLPWPYERGFLLHQKIALSRYATALEDTVDTSRLFRSRSLREFEEALFCHTKSFPISWDTYWDRNDPLRDVDEAAVPVLCICSADDPVCGPPDHTLTTELFHSNPYFFLLLSRHGGHCGFLRQEPLPAWSHEVILESFRALTEFFRTEERIKGLSRHRASFLGGRRRGGALQRREVSSSSNLEEIFNWKRSYTR

SEQ ID NO: 69560 - protein, 87 aa, Homo sapiens
IVTLLAWLAAVFCPTFYSGLRPLPPSLSLPPEEAGRPCLLPCARVAATAPPNPPGPQRGSLRREVGAFGRRRRRRRRRREGRWRPWN

SEQ ID NO: 69561 - protein, 6 aa, Homo sapiens
MFLLLI

SEQ ID NO: 69562 - protein, 44 aa, Homo sapiens
RQNPGLLTSQWGMLFTLQLTLGLPGALSLGCLMRDVQGFSWVGV

SEQ ID NO: 69563 - protein, 14 aa, Homo sapiens
VLLSQMKLAVLTLY

SEQ ID NO: 69564 - protein, 21 aa, Homo sapiens
MYSFLIYVRFFLYAILDSLKR

SEQ ID NO: 69565 - protein, 12 aa, Homo sapiens
MPSSFLLLLLLW

SEQ ID NO: 69566 - protein, 753 aa, Homo sapiens
RKLSVILILTFALSVTNPLHELKAAAFPQTTEKISPNWESGINVDLAISTRQYHLQQLFYRYGENNSLSVEGFRKLLQNIGIDKIKRIHIHHDHDHHSDHEHHSDHERHSDHEHHSEHEHHSDHDHHSHHNHAASGKNKRKALCPDHDSDSSGKDPRNSQGKGAHRPEHASGRRNVKDSVSASEVTSTVYNTVSEGTHFLETIETPRPGKLFPKDVSSSTPPSVTSKSRVSRLAGRKTNESVSEPRKGFMYSRNTNENPQECFNASKLLTSHGMGIQVPLNATEFNYLCPAIINQIDARSCLIHTSEKKAEIPPKTYSLQIAWVGGFIAISIISFLSLLGVILVPLMNRVFFKFLLSFLVALAVGTLSGDAFLHLLPHSHASHHHSHSHEEPAMEMKRGPLFSHLSSQNIEESAYFDSTWKGLTALGGLYFMFLVEHVLTLIKQFKDKKKKNQKKPENDDDVEIKKQLSKYESQLSTNEEKVDTDDRTEGYLRADSQEPSHFDSQQPAVLEEEEVMIAHAHPQEVYNEYVPRGCKNKCHSHFHDTLGQSDDLIHHHHDYHHILHHHHHQNHHPHSHSQRYSREELKDAGVATLAWMVIMGDGLHNFSDGLAIGAAFTEGLSSGLSTSVAVFCHELPHELGDFAVLLKAGMTVKQAVLYNALSAMLAYLGMATGIFIGHYAENVSMWIFALTAGLFMYVALVDMVPEMLHNDASDHGCSRWGYFFLQNAGMLLGFGIMLLISIFEHKIVFRINF

SEQ ID NO: 69567 - protein, 13 aa, Homo sapiens
INMFLAGLSGSCL

SEQ ID NO: 69568 - protein, 22 aa, Homo sapiens
LDLAHLVMLLIAVFLASPDLFK

SEQ ID NO: 69569 - protein, 9 aa, Homo sapiens
LFVILASVT

SEQ ID NO: 69570 - protein, 39 aa, Homo sapiens
VCMQRPWVCVFIALSCWLPAAPPVPGRALGQRLSAPPPS

SEQ ID NO: 69571 - protein, 18 aa, Homo sapiens
IYLMLLVFFGDLQGKEAG

SEQ ID NO: 69572 - protein, 377 aa, Homo sapiens
LLTQEALEAASSDMPLLLLLPLLWAGALAMDPNFWLQVQESVTVQEGLCVLVPCTFFHPIPYYDKNSPVHGYWFREGAIISRDSPVATNKLDQEVQEETQGRFRLLGDPSRNNCSLSIVDARRRDNGSYFFRMERGSTKYSYKSPQLSVHVTDLTHRPKILIPGTLEPGHSKNLTCSVSWACEQGTPPIFSWLSAAPTSLGPRTTHSSVLIITPRPQDHGTNLTCQVKFAGAGVTTERTIQLNVTYVPQNPTTGIFPGDGSGKQETRAGVVHGAIGGAGVTALLALCLCLIFFIVKTHRRKAARTAVGRNDTHPTTGSASPKHQKKSKLHGPTETSSCSGAAPTVEMDEELHYASLNFHGMNPSKDTSTEYSEVRTQ

SEQ ID NO: 69573 - protein, 91 aa, Homo sapiens
ILLFFLLHRWCSNKKNAAVMDQESAGNRTANSEDSDEQDPQEVTYTQLNHCVFTQRKITRPSQRPKTPPTDIIVYTELPNAESRSKVVSCP

SEQ ID NO: 69574 - protein, 61 aa, Homo sapiens
VAFGSSTFALVPVFAHLSILQSLVPAAGAASPVAISAQHLCYSHVTPGDPGAGAGQGPAPS

SEQ ID NO: 69575 - protein, 452 aa, Homo sapiens
TVVSMACVGFFLLQGAWPLMGGQDKPFLSARPSTVVPRGGHVALQCHYRRGFNNFMLYKEDRSHVPIFHGRIFQESFIMGPVTPAHAGTYRCRGSRPHSLTGWSAPSNPLVIMVTGNHRKPSLLAHPGPLLKSGETVILQCWSDVMFEHFFLHREGISEDPSRLVGQIHDGVSKANFSIGPLMPVLAGTYRCYGSVPHSPYQLSAPSDPLDIVITGLYEKPSLSAQPGPTVQAGENVTLSCSSWSSYDIYHLSREGEAHERRLRAVPKVNRTFQADFPLGPATHGGTYRCFGSFRALPCVWSNSSDPLLVSVTGNPSSSWPSPTEPSSKSGICRHLHVLIGTSVVIFLFILLLFFLLYRWCSNKKNAAVMDQEPAGDRTVNRQDSDEQDPQEVTYAQLDHCVFIQRKISRPSQRPKTPLTDTSVYTELPNAEPRSKVVSCPRAPQSGLEGVF

SEQ ID NO: 69576 - protein, 22 aa, Homo sapiens
VDSFSLVVSLCYLFLSPGASGL

SEQ ID NO: 69577 - protein, 7 aa, Homo sapiens
MVLLCLI

SEQ ID NO: 69578 - protein, 25 aa, Homo sapiens
IWRRLCLSLQPELQVSLSLLCVLCS

SEQ ID NO: 69579 - protein, 191 aa, Homo sapiens
TAPQMGPGRCLLTALLLLALAPPPEASQYCGRLEYWNPDNKCCSSCLQRFGPPPCPGALETGDTWKEASLLPLLSRELSSLASQPLSRLLDELEVLEELIVLLDPEPGPGGGMAHGTTRHLAARYGLPAAWSTFAYSLRPSRSPLRALIEMVVAREPSASLGQLGTHLAQLGRADALRVLSKLGSSGVCWA

SEQ ID NO: 69580 - protein, 180 aa, Homo sapiens
IAILLFILLWHLCWPKEKADPYPYPGLVCGVPNTHTPSSSHLSSPGALETGDTWKEASLLPLLSRELSSLASQPLSRLLDELEVLEELIVLLDPEPGPGGGMAHGTTRHLAARYGLPAAWSTFAYSLRPSRSPLRALIEMVVAREPSASLGQLGTHLAQLGRADALRVLSKLGSSGVCWA

SEQ ID NO: 69581 - protein, 13 aa, Homo sapiens
MSPPGFAAFFFFF

SEQ ID NO: 69582 - protein, 22 aa, Homo sapiens
MFTLPPLLFLPALVLLRVTYSS

SEQ ID NO: 69583 - protein, 518 aa, Homo sapiens
RDQWYRAFIFILTFLLYASFHLSRKPISIVKGELHKYCTAWDEADVRFSSQNRKSGSAAPHQLPDNETDCGWAPFDKNNYQQLLGALDYSFLCAYAVGMYLSGIIGERLPIRYYLTFGMLASGAFTALFGLGYFYNIHSFGFYVVTQVINGLVQTTGWPSVVTCLGNWFGKGRRGLIMGVWNSHTSVGNILGSLIAGYWVSTCWGLSFVVPGAIVAAMGIVCFLFLIEHPNDVRCSSTLVTHSKGYENGTNRLRLQKQILKSEKNKPLDPEMQCLLLSDGKGSIHPNHVVILPGDGGSGTAAISFTGALKIPGVIEFSLCLLFAKLVSYTFLFWLPLYITNVDHLDAKKAGELSTLFDVGGIFGGILAGVISDRLEKRASTCGLMLLLAAPTLYIFSTVSKMGLEATIAMLLLSGALVSGPYTLITTAVSADLGTHKSLKGNAHALSTVTAIIDGTGSVGAALGPLLAGLLSPSGWSNVFYMLMFADACALLFLIRLIHKELSCPGSATGDQVPFKEQ

SEQ ID NO: 69584 - protein, 58 aa, Homo sapiens
RRDSLQPLPLQFWPVPLTCLHLGLFGISTCLGPAHCSLHLGSGRRRLELYFRKKKLQF

SEQ ID NO: 69585 - protein, 51 aa, Homo sapiens [sequence omitted]

SEQ ID NO: 69586 - protein, 87 aa, Homo sapiens
KNIFQLVGLDLFVFPYRVVATAPGCGVIECIPDCTSRDQLGRQTDFGMYDYFTRQYGDESTLAFQQTLASCLKARRAAISAGNPTSS

SEQ ID NO: 69587 - protein, 32 aa, Homo sapiens
IFLIFPEVIIFLLPTFQYEGGSSCGGRTRIPR

SEQ ID NO: 69588 - protein, 16 aa, Homo sapiens
VSLLVLALCLSLAWFS

SEQ ID NO: 69589 - protein, 12 aa, Homo sapiens
LKKVRFPWILAL

SEQ ID NO: 69590 - protein, 14 aa, Homo sapiens
MVKQRLGFCLFVCF

SEQ ID NO: 69591 - protein, 23 aa, Homo sapiens
KASLLMVLTFGIGSMYPGQSTSN

SEQ ID NO: 69592 - protein, 33 aa, Homo sapiens
LPLSWLSLGLSLWTLPKHDFRFKAKALMPVSKR

SEQ ID NO: 69593 - protein, 38 aa, Homo sapiens
VWLSGLGLHLTVTGMLLQALEESETNFKGPLFFLLPAC

SEQ ID NO: 69594 - protein, 28 aa, Homo sapiens
MRSPAVIVLTAATASILLPLPASHPHPS

SEQ ID NO: 69595 - protein, 13 aa, Homo sapiens
TATFIFFNITAGL

SEQ ID NO: 69596 - protein, 635 aa, Homo sapiens
RHRGRGPWRMAFLLATCGGLDSGFVPSVQDFDKKLTEADAYLQILIEQLKLFDDKLQNCKEDEQRKKIETLKETTNSMVESIKHCIVLLQIAKSTINPVDAIYQPSPLEPVISTMPSQTVLPPEPVQLCKSEQRPSSLPVGPVLATLGHHQTPTPNSTGSGHSPPSSSLTSPSHVNLSPNTVPEFSYSSSEDEFYDADEFHQSGSSPKRLIDSSGSASVLTHSSSGNSLKRPDTTESLNSSLSNGTSDADLFDSHDDRDDDAEAGSVEEHKSVIMHLLSQVRLGMDLTKVVLPTFILERRSLLEMYADFFAHPDLFVSISDQKDPKDRMVQVVKWYLSAFHAGRKGSVAKKPYNPILGEIFQCHWTLPNDTEENTELVSEGPVPWVSKNSVTFVAEQVSHHPPISAFYAECFNKKIQFNAHIWTKSKFLGMSIGVHNIGQGCVSCLDYDEHYILTFPNGYGRSILTVPWVELGGECNINCSKTGYSANIIFHTKPFYGGKKHRITAEIFSPNDKKSFCSIEGEWNGVMYAKYATGENTVFVDTKKLPIIKKKVRKLEDQNEYESRSLWKDVTFNLKIRDIDAATEAKHRLEERQRAEARERKEKEIQWETRLFHEDGECWVYDEPLLKRLGAAKH

SEQ ID NO: 69597 - protein, 29 aa, Homo sapiens
MLLWTAVLFLAPVAGTPAAPPKAVLKLEP

SEQ ID NO: 69598 - protein, 730 aa, Homo sapiens
KLLTTLLAVVAAASQAEVESEAGWGMVTPDLLFAEGTAAYARGDWPGVVLSMERALRSRAALRALRLRCRTQCAADFPWELDPDWSPSPAQASGAAALRDLSFFGGLLRRAACLRRCLGPPAAHSLSEEMELEFRKRSPYNYLQVAYFKINKLEKAVAAAHTFFVGNPEHMEMQQNLDYYQTMSGVKEADFKDLETQPHMQEFRLGVRLYSEEQPQEAVPHLEAALQEYFVAYEECRALCEGPYDYDGYNYLEYNADLFQAITDHYIQVLNCKQNCVTELASHPSREKPFEDFLPSHYNYLQFAYYNIGNYTQAVECAKTYLLFFPNDEVMNQNLAYYAAMLGEEHTRSIGPRESAKEYRQRSLLEKELLFFAYDVFGIPFVDPDSWTPEEVIPKRLQEKQKSERETAVRISQEIGNLMKEIETLVEEKTKESLDVSRLTREGGPLLYEGISLTMNSKLLNGSQRVVMDGVISDHECQELQRLTNVAATSGDGYRGQTSPHTPNEKFYGVTVFKALKLGQEGKVPLQSAHLYYNVTEKVRRIMESYFRLDTPLYFSYSHLVCRTAIEEVQAERKDDSHPVHVDNCILNAETLVCVKEPPAYTFRDYSAILYLNGDFDGGNFYFTELDAKTVTAEVQPQCGRAVGFSSGTENPHGVKAVTRGQRCAIALWFTLDPRHSERDRVQADDLVKMLFSPEEMDLSQEQPLDAQQGPPEPAQESLSGSESKPKDEL

SEQ ID NO: 69599 - protein, 26 aa, Homo sapiens
ISVMFILISLLVQCQLFKVVMPDNVF

SEQ ID NO: 69600 - protein, 275 aa, Homo sapiens
IPALRPALLWALLALWLCCATPAHALQCRDGYEPCVNEGMCVTYHNGTGYCKCPEGFLGEYCQHRDPCEKNRCQNGGTCVAQAMLGKATCRCASGFTGEDCQYSTSHPCFVSRPCLNGGTCHMLSRDTYECTCQVGFTGKECQWTDACLSHPCANGSTCTTVANQFSCKCLTGFTGQKCETDVNECDIPGHCQHGGTCLNLPGSYQCQCLQGFTGQYCDSLYVPCAPSPCVNGGTCRQTGDFTFECNCLPETVRRGTELWERDREVWNGKEHDEN

SEQ ID NO: 69601 - protein, 8 aa, Homo sapiens
ILVYILLL

SEQ ID NO: 69602 - protein, 14 aa, Homo sapiens
LPAALLLLLLLWDR

SEQ ID NO: 69603 - protein, 15 aa, Homo sapiens
LRLIMRILATIMFLI

SEQ ID NO: 69604 - protein, 29 aa, Homo sapiens
VPPRWLIFWILVNSGFHRVGQDGLDLLTS

SEQ ID NO: 69605 - protein, 15 aa, Homo sapiens
IKIMINLLVSTVPMV

SEQ ID NO: 69606 - protein, 227 aa, Homo sapiens
LPALLLPLLGLAAAAVADCPSSTWIQFQDSCYIFLQEAIKVESIEDVRNQCTDHGADMISIHNEEENAFILDTLKKQWKGPDDILLGMFYDTDDASFKWFDNSNMTFDKWTDQDDDEDLVDTCAFLHIKTGEWKKGNCEVSSVEGTLCKTAIPYKRKYLSDNHILISALVIASTVILTVLGAIIWFLYKKHSDSRFTTVFSTAPQSPYNEDCVLVVGEENEYPVQFD

SEQ ID NO: 69607 - protein, 18 aa, Homo sapiens
LAACTAYLLLLPTSPFLC

SEQ ID NO: 69608 - protein, 34 aa, Homo sapiens
MVFLATLGLWDVFFGFEENKCSMSYMFEYPEYQR

SEQ ID NO: 69609 - protein, 64 aa, Homo sapiens
IRRFSGGWLLSAAGCSSTRPPSQPQPAAPTLPAPSRPVSYCRRHRRGSGPGPDGSVQRRLQDDE

SEQ ID NO: 69610 - protein, 31 aa, Homo sapiens
KFVAVIQLLIFSRGLTPLDSGWSWEDVNPVP

SEQ ID NO: 69611 - protein, 31 aa, Homo sapiens
KHLLYALMELLLIELCPELRVHLDQLKAGQV

SEQ ID NO: 69612 - protein, 85 aa, Homo sapiens
RMALSVLRLALLLLAVTFAASLIPQFGLFSKYRTPNCSQYRLPGCPRHFNPVCGSDMSTYANECTLCMKIREGGHNIKIIRNGPC

SEQ ID NO: 69613 - protein, 37 aa, Homo sapiens
VFIVLVSLILNKHSLKELLIPRSKFSLSKVDFRLLKE

SEQ ID NO: 69614 - protein, 74 aa, Homo sapiens
VARDLKMRLHLLLLLALCGAGTTAAELSYSLRGNWSICNGNGSLELPGAVPGCVHSALFQQGLIQSLTLSPRLE

SEQ ID NO: 69615 - protein, 82 aa, Homo sapiens
TLSLLLLVTSVTLLVARVFQKAVDQSIEKKIVLRNGTEAFDSWEKPPLPVYTQFYFFNVTNPEEILRGETPRVEEVGPYTYR

SEQ ID NO: 69616 - protein, 20 aa, Homo sapiens
LEIRGLRCFCFLSAEVWVLL

SEQ ID NO: 69617 - protein, 492 aa, Homo sapiens
ITRCLAWSVLISRLAMATYTCITCRVAFRDADMQRAHYKTDWHRYNLRRKVASMAPVTAEGFQERVRAQRAVAEEESKGSATYCTVCSKKFASFNAYENHLKSRRHVELEKKAVQAVNRKVEMMNEKNLEKGLGVDSVDKDAMNAAIQQAIKAQPSMSPKKAPPAPAKEARNVVAVGTGGRGTHDRDPSEKPPRLQWFEQQAKKLAKQQEEDSEEEEEDLDGDDWEDIDSDEELECEDTEAMDDVVEQDAEEEEAEEGPPLGAIPITDCLFCSHHSSSLMKNVAHMTKDHSFFIPDIEYLSDIKGLIKYLGEKVGVGKICLWCNEKGKSFYSTEAVQAHMNDKSHCKLFTDGDAALEFADFYDFRSSYPDHKEGEDPNKAEELPSEKNLEYDDETMELILPSGARVGHRSLMRYYKQRFGLSRAVAVAKNRKAVGRVLQQYRALGWTGSTGAALMRERDMQYVQRMKSKWMLKTGMKNNATKQMHFRVQVRF

SEQ ID NO: 69618 - protein, 14 aa, Homo sapiens
IFLSLWAVIFVLYQ

SEQ ID NO: 69619 - protein, 124 aa, Homo sapiens
IATGILFPVLYKLATSPLDRQRKEDRKSEDQKALLSSSGLNEYEEENEEEDAEKWNEMDFEMIETNDTMRHSIIETSRSSLTEPTAEVYNQYPSNALVFESSPFNTGSAHVKHLPETRTKGTNV

SEQ ID NO: 69620 - protein, 17 aa, Homo sapiens
ILCCLLIILPCFILPGI

SEQ ID NO: 69621 - protein, 29 aa, Homo sapiens
LFIGILFIILRKRQGSRGAMGHYVLAERE

SEQ ID NO: 69622 - protein, 36 aa, Homo sapiens
IIFWIKLEVCIILMSPDSNILESSRGDNHLHFGRNN

SEQ ID NO: 69623 - protein, 33 aa, Homo sapiens
VGVAGGILSAVMKWAPFSALHRQALHLCEDCDT

SEQ ID NO: 69624 - protein, 27 aa, Homo sapiens
IFLTLSFTFFNQAWWSFKMLMNLRSGA

SEQ ID NO: 69625 - protein, 24 aa, Homo sapiens
RLACIAAFFCGLLILSSIQDKSKH

SEQ ID NO: 69626 - protein, 51 aa, Homo sapiens
LHCLVFLVLYKLAWSESMERDCATFCAKKFADHLHKFHENDNGAAAGDLWQ

SEQ ID NO: 69627 - protein, 519 aa, Homo sapiens
VKFFPLLLLYPLTYLAPSVSTLWLHLLLKATETSGPTYIKLGQWASTRRDLFSEAFCAQFSKLHVRVTPHPWTHTERFLRQAFGDDWGSILSFENREPVGSGCVAQVYKAYANTAFLETDSVQRLGRASCLPPFSHTGAVGGLRELFGYLGNGRKPPENLADQSFLERLLLPKADLVGSNAGVSRAQVPGHQPEATNLISVAVKVLHPGLLAQVHMDLLLMKIGSRVLGVLPGIKWLSLPEIVEEFEKLMVQQIDLRYEAQNLEHFQVNFRNVKAVKFPTPLRPFVTREVLVETYEESVPVSSYQQAGIPVDLKRKIARLGINMLLKMIFVDNFVHADLHPGNILVQGANGLSSSQEAQLQQADICDTLVVAVPSSLCPLRLVLLDAGIVAELQAPDLRNFRAVFMAVVMGQGQRVAELILHHARASECRDVEGFKTEMAMLVTQARKNTITLEKLHVSSLLSSVFKLLMTHKVKLESNFASIVFAIMVLEGLGRSLDPKLDILEAARPFLLTGPVCPP

SEQ ID NO: 69628 - protein, 23 aa, Homo sapiens
KRVVFLKQLASGLLLVTGPLVLN

SEQ ID NO: 69629 - protein, 688 aa, Homo sapiens
ILIFIFIVCYRTSKMQTSSSRSVHLSEWQKNYFAITSGICTGPKADAYRAQILRIQYAWANSEISQVCATKLFKKYAEKYSAIIDSDNVESGLNNYAENILTLAGSQQTDSDKWQSGLSINNVFKMSSVQKMMQAGKKFKDSLLEPALASVVIHKEATVFDLPKFSVCGSSQESDSLPNSAHDRDRTQDFPESNRLKLLQNAQPPMVTNTARTCPTFSAPVGESATAKFHVTPLFGNVKKENHSSAKENIGLNVFLSNQSCFPAACENPQRKSFYGSGTIDALSNPILNKACSKTEDNGPKEDSSLPTFKTAKEQLWVDQQKKYHQPQRASGSSYGGVKKSLGASRSRGILGKFVPPIPKQDGGEQNGGMQCKPYGAGPTEPAHPVDERLKNLEPKMIELIMNEIMDHGPPVNWEDIAGVEFAKATIKEIVVWPMLRPDIFTGLRGPPKGILLFGPPGTGKTLIGKCIASQSGATFFSISASSLTSKWVGEGEKMVRALFAVARCQQPAVIFIDEIDSLLSQRGDGEHESSRRIKTEFLVQLDGATTSSEDRILVVGATNRPQEIDEAARRRLVKRLYIPLPEASARKQIVINLMSKEQCCLSEEEIEQIVQQSDAFSGADMTQLCREASLGPIRSLQTADIATITPDQVRPIAYIDFENAFRTVRPSVSPKDLELYENWNKTFGCGK

SEQ ID NO: 69630 - protein, 54 aa, Homo sapiens
IWCLAWMPGLQALLVVALHSHPAEEDLLDWIFSGFLSDIVLYLPMKTLFFGLCK

SEQ ID NO: 69631 - protein, 23 aa, Homo sapiens
LESVVFQQFLLLFPWAAWASFHP

SEQ ID NO: 69632 - protein, 14 aa, Homo sapiens
ISSFLFLLGLGSLL

SEQ ID NO: 69633 - protein, 7 aa, Homo sapiens
IVVLLCV

SEQ ID NO: 69634 - protein, 32 aa, Homo sapiens
IVHFLFFFLGSLLFKKYPCVFQLNHPFIFKPS

SEQ ID NO: 69635 - protein, 431 aa, Homo sapiens
RMKPSLLCRPLSCFLMLLPWPLATLTSTTLWQCPPGEEPDLDPGQGTLCRPCPPGTFSAAWGSSPCQPHARCSLWRRLEAQVGMATRDTLCGDCWPGWFGPWGVPRVPCQPCSWAPLGTHGCDEWGRRARRGVEVAAGASSGGETRQPGNGTRAGGPEETAAQYAVIAIVPVFCLMGLLGILVCNLLKRKGYHCTAHKEVGPGPGGGGSGINPAYRTEDANEDTIGVLVRLITEKKENAAALEELLKEYHSKQLVQTSHRPVSKLPPAPPNVPHICPHRHHLHTVQGLASLSGPCCSRCSQKKWPEVLLSPEAVAATTPVPSLLPNPTRVPKAGAKAGRQGEITILSVGRFRVARIPEQRTSSMVSEVKTITEAGPSWGDLPDSPQPGLPPEQQALLGSGGSRTKWLKPPAENKAEENRYVVRLSESNLVI

SEQ ID NO: 69636 - protein, 27 aa, Homo sapiens
LKPAFVNYFFLLLLEVSHLLLIINADV

SEQ ID NO: 69637 - protein, 920 aa, Homo sapiens
LLLFLHALFKMIDLSFLTEEEQEAIMKVLQRDAALKRAEEERVRHLPEKIKDDQQLKNMSGQWFYEAKAKRHRDKIHGADIIRASMRKKRPQIAAEQSKDRENGAKESWVNNVNKDAFLPPELAGVVEEPEEDAAPASPSSSVVNPASSVIDMSQENTRKPNVSPEKRKNPFNSSKLPEGHSSQQTKNEQSKNGRTGLFQTSKEDELSESKEKSTVADTSIQKLEKSKQTLPGLSNGSQIKAPIPKARKMIYKSTDLNKDDNQSFPRQRTDSLKARGAPRGILKRNSSSSSTDSETLRYNHNFEPKSKIVSPGLTIHERISEKEHSLEDNSSPNSLEPLKHVRFSAVKDELPQSPGLIHGREVGEFSVLESDRLKNGMEDAGDTEEFQSDPKPSQYRKPSLFHQSTSSPYVSKSETHQPMTSGSFPINGLHSHSEVLTARPQSMENSPTINEPKDKSSELTRLESVLPRSPADELSHCVEPEPSQVPGGSSRDRQQGSEEEPSPVLKTLERSAARKMPSKSLEDISSDSSNQAKVDNQPEELVRSAEDDEKPDQKPVTNECVPRISTVPTQPDNPFSHPDKLKRMSKSVPAFLQDEVSGSVMSVYSGDFGNLEVKGNIQFAIEYVESLKELHVFVAQCKDLAAADVKKQRSDPYVKAYLLPDKGKMGKKKTLVVKKTLNPVYNEILRYKIEKQILKTQKLNLSIWHRDTFKRNSFLGEVELDLETWDWDNKQNKQLRWYPLKRKTAPVALEAENRGEMKLALQYVPEPVPGKKLPTTGEVHIWVKECLDLPLLRGSHLNSFVKCTILPDTSRKSRQKTRAVGKTTNPIFNHTMVYDGFRPEDLMEACVELTVWDHYKLTNQFLGGLRIGFGTGKSYGTEVDWMDSTSEEVALWEKMVNSPNTWIEATLPLRMLLIAKISK

SEQ ID NO: 69638 - protein, 6 aa, Homo sapiens
ILFVFF

SEQ ID NO: 69639 - protein, 306 aa, Homo sapiens
TCLSLLSLGTCLGLAWFVFQQSEKFAKVENQYQLLKLETNEFQQLQSKISLISEKWQKSEAIMEQLKSFQIIAHLKRLQEEINEVKTWSNRITEKQDILNNSLTTLSQDITKVDQSTTSMAKDVGLKITSVKTDIRRISGLVTDVISLTDSVQELENKIEKVEKNTVKNIGDLLSSSIDRTATLRKTASENSQRINSVKKTLTELKSDFDKHTDRFLSLEGDRAKVLKTVTFANDLKPKVYNLKKDFSRLEPLVNDLTLRIGRLVTDLLQREKEIAFLSEKISNLTIVQAEIKDIKDEIAHISDMN

SEQ ID NO: 69640 - protein, 20 aa, Homo sapiens
KVKILLWEMLLLMLLYKVIQ

SEQ ID NO: 69641 - protein, 19 aa, Homo sapiens
KWGVFSMVVGRLVRLVPFV

SEQ ID NO: 69642 - protein, 240 aa, Homo sapiens
KLLAATLLLALLSCCLTVVSFYQVAALQGDLASLRAELQGHHAEKLPAGAGAPKAGLEEAPAVTAGLKIFEPPAPGEGNSSQNSRNKRAVQGPEETVTQDCLQLIADSETPTIQKGSYTFVPWLLSFKRGSALEEKENKILVKETGYFFIYGQVLYTDKTYAMGHLIQRKKVHVFGDELSLVTLFRCIQNMPETLPNNSCYSAGIAKLEEGDELQLAIPRENAQISLDGDVTFFGALKLL

SEQ ID NO: 69643 - protein, 71 aa, Homo sapiens
LGSLLKLSLYFSAGLLPYVHLPISSYLNHARWTWGDQTTLQGFLTHFLREEYGTFSLAKSEIGSSMSEILL

SEQ ID NO: 69644 - protein, 13 aa, Homo sapiens
MHPLVLIYVSFSI

SEQ ID NO: 69645 - protein, 160 aa, Homo sapiens
IVAVYCPVIAAVFIVLKMVNYRLHRALDAGEVVDRTANEFTDQRTKAEQGNCSTRRKDSNGPSDPGGGIEMSEFIREATPPVGCSSRNSYAGLDPSNQIGSGSSRLGTAATIKGDTDTAKTSDDISLSLGQSSSLCKEGSEEQGKNVILYHDVIYCGDQS

SEQ ID NO: 69646 - protein, 43 aa, Homo sapiens
MWLIYMRSIVALPPERGWMQLLVFLGVTVIGNTDTVTHPPSYL

SEQ ID NO: 69647 - protein, 41 aa, Homo sapiens
ILWRGLLWTFTFSSSSAIAGEGAIPDPQACPPLPQTPHQVL

SEQ ID NO: 69648 - protein, 32 aa, Homo sapiens
RIGLNWSLFMLSGIPGVSLKSCLPIPENIMAT

SEQ ID NO: 69649 - protein, 43 aa, Homo sapiens
KLLSHCLLVTLAAHLPAEFTPAVHASLDKFLASVSTVLTSKYR

SEQ ID NO: 69650 - protein, 43 aa, Homo sapiens; identical to SEQ ID NO: 69649

SEQ ID NO: 69651 - protein, 544 aa, Homo sapiens
RPVGVSMPRGWAAPLLLLLLQGGWGCPDLVCYTDYLQTVICILEMWNLHPSTLTLTWQDQYEELKDEATSCSLHRSAHNATHATYTCHMDVFHFMADDIFSVNITDQSGNYSQECGSFLLAESIKPAPPFNVTVTFSGQYNISWRSDYEDPAFYMLKGKLQYELQYRNRGDPWAVSPRRKLISVDSRSVSLLPLEFRKDSSYELQVRAGPMPGSSYQGTWSEWSDPVIFQTQSEELKEGWNPHLLLLLLLVIVFIPAFWSLKTHPLWRLWKKIWAVPSPERFFMPLYKGCSGDFKKWVGAPFTGSSLELGPWSPEVPSTLEVYSCHPPRSPAKRLQLTELQEPAELVESDGVPKPSFWPTAQNSGGSAYSEERDRPYGLVSIDTVTVLDAEGPCTWPCSCEDDGYPALDLDAGLEPSPGLEDPLLDAGTTVLSCGCVSAGSPGLGGPLGSLLDRLKPPLADGEDWAGGLPWGGRSPGGVSESEAGSPLAGLDMDTFDSGFVGSDCSSPVECDFTSPGDEGPPRSYLRQWVVIPPPLSSPGPQAS

SEQ ID NO: 69652 - protein, 203 aa, Homo sapiens
MYRERLRTLLVIAVVMSLLNALSTSGGSISWNDFVHEMLAKGEVQRVQVVPESDVVEVYLHPGAVVFGRPRLALMYRMQVANIDKFEEKLRAAEDELNIEAKDRIPVSYKRTGFFGNALYSVGMTAVGLAILWYVFRLAGMTGREGGFSAFNQLKMARFTIVDGKMGKGVSFKDVAGMHEAKLEVREFVDYLKVKAAWAGREV

SEQ ID NO: 69653 - protein, 53 aa, Homo sapiens
IWWGAGWNLGGCFILGTENGLFSLASCAALGARGLHRLSDREQLPALSCDLQA

SEQ ID NO: 69654 - protein, 283 aa, Homo sapiens
LWGAGAVLRCFLPMGFWCRMSENQEQEEVITVRVQDPRVQNEGSWNSYVDYKIFLHTNSKAFTAKTSCVRRRYREFVWLRKQLQRNAGLVPVPELPGKSTFFGTSDEFIEKRRQGLQHFLEKVLQSVVLLSDSQLHLFLQSQLSVPEIEACVQGRSTMTVSDAILRYAMSNCGWAQEERQSSSHLAKGDQPKSCCFLPRSGRRSSPSPPPSEEKDHLEVWAPVVDSEVPSLESPTLPPLSSPLCCDFGRPKEGTSTLQSVRRAVGGDHAVPLDPGQLETVLEK

SEQ ID NO: 69655 - protein, 158 aa, Homo sapiens
VTSSFIVFFLFPRSVIVQPAGLNSSTVAFDEADIYLNITNILNISNGNYYPIMVTQLTLEVLHLSLVVGQVSNNLLLHIGPLASEQMFYAVATKIRDENTYKICTWLEIKVHHVLLHIQGTLTCSYLSHSEQLVFQSYEYVDCRGNASVPHQLTPHPP

SEQ ID NO: 69656 - protein, 40 aa, Homo sapiens
MGAAGLRLGSFSLCCLLLRGTARYFPEWLYQQCVEASSAC

SEQ ID NO: 69657 - protein, 222 aa, Homo sapiens
KLHYVAVLTLAILMFLTWLPESLSCNKALCASDVSKCLIQELCQCRPGEGNCSCCKECMLCLGALWDECCDCVGMCNPRNYSDTPPTSKSTVEELHEPIPSLFRALTEGDTQLNWNIVSFPVAEELSHHENLVSFLETVNQPHHQNVSVPSNNVHAPYSSDKEHMCTVVYFDDCMSIHQCKISCESMGASKYRWFHNACCECIGPECIDYGSKTVKCMNCMF

SEQ ID NO: 69658 - protein, 752 aa, Homo sapiens
KLSVILILTFALSVTNPLHELKAAAFPQTTEKISPNWESGINVDLAISTRQYHLQQLFYRYGENNSLSVEGFRKLLQNIGIDKIKRIHIHHDHDHHSDHEHHSDHERHSDHEHHSEHEHHSDHDHHSHHNHAASGKNKRKALCPDHDSDSSGKDPRNSQGKGAHRPEHASGRRNVKDSVSASEVTSTVYNTVSEGTHFLETIETPRPGKLFPKDVSSSTPPSVTSKSRVSRLAGRKTNESVSEPRKGFMYSRNTNENPQECFNASKLLTSHGMGIQVPLNATEFNYLCPAIINQIDARSCLIHTSEKKAEIPPKTYSLQIAWVGGFIAISIISFLSLLGVILVPLMNRVFFKFLLSFLVALAVGTLSGDAFLHLLPHSHASHHHSHSHEEPAMEMKRGPLFSHLSSQNIEESAYFDSTWKGLTALGGLYFMFLVEHVLTLIKQFKDKKKKNQKKPENDDDVEIKKQLSKYESQLSTNEEKVDTDDRTEGYLRADSQEPSHFDSQQPAVLEEEEVMIAHAHPQEVYNEYVPRGCKNKCHSHFHDTLGQSDDLIHHHHDYHHILHHHHHQNHHPHSHSQRYSREELKDAGVATLAWMVIMGDGLHNFSDGLAIGAAFTEGLSSGLSTSVAVFCHELPHELGDFAVLLKAGMTVKQAVLYNALSAMLAYLGMATGIFIGHYAENVSMWIFALTAGLFMYVALVDMVPEMLHNDASDHGCSRWGYFFLQNAGMLLGFGIMLLISIFEHKIVFRINF

SEQ ID NO: 69659 - protein, 94 aa, Homo sapiens
ILFILLFFLLHRWCSNKKNAAVMDQESAGNRTANSEDSDEQDPQEVTYTQLNHCVFTQRKITRPSQRPKTPPTDIIVYTELPNAESRSKVVSCP

SEQ ID NO: 69660 - protein, 74 aa, Homo sapiens
ILFAILLVLVFIKKVAKKPTNKAPHPKQEPQEINFPDDLPGSNTAAPVQETLHGCQPVTQEDGKESRISVQERQ

SEQ ID NO: 69661 - protein, 46 aa, Homo sapiens
IILWYLACASASCFMSTSYSCQGMWTPGSLVSKDPGTWVGLSWTEA

SEQ ID NO: 69662 - protein, 339 aa, Homo sapiens
MLARALLLCAVLALSHTANPCCSHPCQNRGVCMSVGFDQYKCDCTRTGFYGENCSTPEFLTRIKLFLKPTPNTVHYILTHFKGFWNVVNNIPFLRNAIMSYVLTSRSHLIDSPPTYNADYGYKSWEAFSNLSYYTRALPPVPDDCPTPLGVKGKKQLPDSNEIVEKLLLRRKFIPDPQGSNMMFAFFAQHFTHQFFKTDHKRGPAFTNGLGHGVDLNHIYGETLARQRKLRLFKDGKMKYQIIDGEMYPPTVKDTQAEMIYPPQVPEHLRFAVGQEVFGLVPGLMMYATIWLREHNRVCDVLKQEHPEWGDEQLFQTSRLILIGKQENDLYKTLFPREN

SEQ ID NO: 69663 - protein, 450 aa, Homo sapiens
MTLGIYLQLFFLSIVSQPTFINSVLPISAALPSLDQKKRGGHKACCLLTPPPPPLFPPPFFRGGRSPLLSPDMKNLMLELETSQSPCMQGSLGSPGPPGPQGPPGLPGKTGPKGEKGELGRPGRKGRPGPPGVPGMPGPIGWPGPEGPRGEKGDLGMMGLPGSRGPMGSKGYPGSRGEKGSRGEKGDLGPKGEKGFPGFPGMLGQKGEMGPKGEPGIAGHRGPTGRPGKRGKQGQKGDSGVMGPPGKPGPSGQPGRPGPPGPPPAGQLIMGPKGERGFPGPPGRCLCGPTMNVNNPSYGESVYGPSSPRVPVIFVVNNQEELERLNTQNAIAFRRDQRSLYFKDSLGWLPIQLTPFYPVDYTADQHGTCGDGLLQPGEECDDGNSDVGDDCIRDCHRAYCGDGHRHEGVEDCDGSDFGYLTCETYLPGSYGDLQCTQYCYIDSTPCRYFT

SEQ ID NO: 69664 - protein, 244 aa, Homo sapiens
MFSSFFLLGKTLMQTLAQMMADSPSSYSSSSSSSSSSSSSSSSSSSSSSSLHNEQVLQVVVPGINLPVNQLTYFFTAVLISGVVHEIGHGIAAIREQVRFNGFGIFLFIIYPGAFVDLFTTHLQLISPVQQLRIFCAGIWHNFVLALLGILALVLLPVILLPFYYTGVGVLITEVAEDSPAIGPRGLFVGDLVTHLQDCPVTNVQDWNECLDTIAYEPQIGYCISASTLQQLSFPVRGVYISSI

SEQ ID NO: 69665 - protein, 433 aa, Homo sapiens
MFSSFFLLGKTLMQTLAQMMADSPSSYSSSSSSSSSSSSSSSSSSSSSSSLHNEQVLQVVVPGINLPVNQLTYFFTAVLISGVVHEIGHGIAAIREQVRFNGFGIFLFIIYPGAFVDLFTTHLQLISPVQQLRIFCAGIWHNFVLALLGILALVLLPVILLPFYYTGVGVLITEVAEDSPAIGPRGLFVGDLVTHLQDCPVTNVQDWNECLDTIAYEPQIGYCISASTLQQLSFPVRAYKRLDGSTECCNNHSLTDVCFSYRNNFNKRLHTCLPARKAVEATQVCRTNKDCKKSSSSSFCIIPSLETHTRLIKVKHPPQIDMLYVGHPLHLHYTVSITSFIPRFNFLSIDLPVVVETFVKYLISLSGALAIVNAVPCFALDGQWILNSFLDATLTSVIGDNDVKDLIGFFILLGGSVLLAANVTLGLWMVTAR

SEQ ID NO: 69666 - protein, 249 aa, Homo sapiens
RNRWWLLPLIAALASGSFWFFSTPEVETTAVQEFQNQMNQLKNKYQGQDEKLWKRSQTFLEKHLNSSHPRSQPAILLLTAARDAEEALRCLSEQIADAYSSFRSVRAIRIDGTDKATQDSDTVKLEVDQELSNGFKNGQNAAVVHRFESFPAGSTLIFYKYCDHENAAFKDVALVLTVLLEEETLGTSLGLKEVEEKVRDFLKVKFTNSNTPNSYNHMDPDKLNGLWSRISHLVLPVQPENALKRGICL

SEQ ID NO: 69667 - protein, 76 aa, Homo sapiens
LTVVLLAVAACVLLLTSAQLGLHIWQLRSQCMWPRETQLLLEVPPSTEDARSCQFPEEERGERSAEEKGRLGDLWV

SEQ ID NO: 69668 - protein, 41 aa, Homo sapiens
VLLHMLLSVGCLAYFFDAPEMDHLPTTTATPNQTVAAAKSS

SEQ ID NO: 69669 - protein, 74 aa, Homo sapiens
LPLLFHQNVLLPLWHLLLEALAWAQEHCHEACRGEVTWDCMKTQLSEAVHWTWLCLQDITVAFLDWALALISQQ

SEQ ID NO: 69670 - protein, 44 aa, Homo sapiens
LGVILFMLVCGQPPFQEANDSETLTMIMDCKYTVPSHVSKECKE

SEQ ID NO: 69671 - protein, 191 aa, Homo sapiens
RRRRRRMRRMRRMWATQGLAVALALSVLPGSRALRPGDCEVCISYLGRFYQDLKDRDVTFSPATIENELIKFCREARGKENRLCYYIGATDDAATKIINEVSKPLAHHIPVEKICEKLKKKDSQICELKYDKQIDLSTVDLKKLRVKELKKILDDWGETCKGCAEKSDYIRKINELMPKYAPKAASARTDL

SEQ ID NO: 69672 - protein, 111 aa, Homo sapiens [sequence omitted]

SEQ ID NO: 69673 - protein, 16 aa, Homo sapiens
LFTQFMGVVMFITLLG

SEQ ID NO: 69674 - protein, 19 aa, Homo sapiens
LQSLLILFLGVTIFEAKLT

SEQ ID NO: 69675 - protein, 29 aa, Homo sapiens
KMASCWICVLLYLCTLVAPLCCPTREFSV

SEQ ID NO: 69676 - protein, 11 aa, Homo sapiens
LGMILQTFLTL

SEQ ID NO: 69677 - protein, 57 aa, Homo sapiens
ITGAAVVITILKVFFPVSEYKGILQLDKVDVIPVTAINLYPDGPEKRAENLEDKTCI

SEQ ID NO: 69678 - protein, 222 aa, Homo sapiens
VAGATSLVTLLLAVPITVLAVLALVPQDQGGLVTETADPGAQAQQGLGFQKLPEEEPETDLSPGLPAAHLIGAPLKGQGLGWETTKEQAFLTSGTQFSDAEGLALPQDGLYYLYCLVGYRGRAPPGGGDPQGRSVTLRSSLYRAGGAYGPGTPELLLEGAETVTPVLDPARRQGYGPLWYTSVGFGGLVQLRRGERVYVNISHPDMVDFARGKTFFGAVMVG

SEQ ID NO: 69679 - protein, 45 aa, Homo sapiens
VFILFLPVVFYLSSFLHSEQKKRKLILPKRLKSSTSFANIQENSN

SEQ ID NO: 69680 - protein, 30 aa, Homo sapiens
INVFGAIFFTLFAKGEVQNWALNDHHGHRH

SEQ ID NO: 69681 - protein, 12 aa, Homo sapiens
MLNGIASLLGVF

SEQ ID NO: 69682 - protein, 279 aa, Homo sapiens
LSSKSGLSRGRKVMLSALGMLAAGGAGLAMALHSAVSASDLELHPPSYPWSHRGLLSSLDHTSIRRGFQVYKQVCASCHSMDFVAYRHLVGVCYTEDEAKELAAEVEVQDGPNEDGEMFMRPGKLFDYFPKPYPNSEAARAANNGALPPDLSYIVRARHGGEDYVFSLLTGYCEPPTGVSLREGLYFNPYFPGQAIAMAPPIYTDVLEFDDGTPATMSQIAKDVCTFLRWASEPEHDHRKRMGLKMLMMMALLVPLVYTIKRHKWSVLKSRKLAYRPPK

SEQ ID NO: 69683 - protein, 196 aa, Homo sapiens
ILPFLYLGSAYHAARRDMLDALGITALLNVSSDCPNHFEGHYQYKCIPVEDNHKADISSWFMEAIEYIDAVKDCRGRVLVHCQAGISRSATICLAYLMMKKRVRLEEAFEFVKQRRSIISPNFSFMGQLLQFESQVLATSCAAEAASPSGPLRERGKTPATPTSQFVFSFPVSVGVHSAPSSLPYLHSPITTSPSC

SEQ ID NO: 69684 - protein, 10 aa, Homo sapiens
IVVLFSSLAV

SEQ ID NO: 69685 - protein, 47 aa, Homo sapiens
LLQYCFLLITCLLTALEAVPIDIDKTKVQNIHPVESAKIEPPVSEMK

SEQ ID NO: 69686 - protein, 8 aa, Homo sapiens
LLGALMLL

SEQ ID NO: 69687 - protein, 113 aa, Homo sapiens
IILALVLLVVLLVVCGPLAYKKLVKKFRQKKQRQWIGPTGMNQNMSFHRNHTATVRSHAENPTASHVDNEYSQPPRNSHLSAYPALEGALHRSSMQPDNSSDSDYDLHGAQRL

SEQ ID NO: 69688 - protein, 22 aa, Homo sapiens
LLSLSCLALSVLLLAQLSDAAK

SEQ ID NO: 69689 - protein, 66 aa, Homo sapiens
MVGLLLIALLTWGYIRYSGQYRELGGAIDFGAAYVLEQASSHIGNSTQATVRDAVVGRPSMDKKAQ

SEQ ID NO: 69690 - protein, 18 aa, Homo sapiens
VLLIVVFVYVATRPTITE

SEQ ID NO: 69691 - protein, 16 aa, Homo sapiens
MWWFQNVLLLYMLCSS

SEQ ID NO: 69692 - protein, 530 aa, Homo sapiens
VPSHPAPTSPMGPQRRLSPAGAALLWGFLLQLTAAQEAILHASGNGTTKDYCMLYNPYWTALPSTLENATSISLMNLTSTPLCNLSDIPPVGIKSKAVVVPWGSCHFLEKARIAQKGGAEAMLVVNNSVLFPPSGNRSEFPDVKILIAFISYKDFRDMNQTLGDNITVKMYSPSWPNFDYTMVVIFVIAVFTVALGGYWSGLVELENLKAVTTEDREMRKKKEEYLTFSPLTVVIFVVICCVMMVLLYFFYKWLVYVMIAIFCIASAMSLYNCLAALIHKIPYGQCTIACRGKNMEVRLIFLSGLCIAVAVVWAVFRNEDRWAWILQDILGIAFCLNLIKTLKLPNFKSCVILLGLLLLYDVFFVFITPFITKNGESIMVELAAGPFGNNEKLPVVIRVPKLIYFSVMSVCLMPVSILGFGDIIVPGLLIAYCRRFDVQTGSSYIYYVSSTVAYAIGMILTFVVLVLMKKGQPALLYLVPCTLITASVVAWRRKEMKKFWKGNSYQMMDHLDCATNEENPVISGEQIVQQ

SEQ ID NO: 69693 - protein, 208 aa, Homo sapiens
LCRVLLFLSQFCILSGGESTEIPPYVMKCPSNGLCSRLPADCIDCTTNFSCTYGKPVTFDCAVKPSVTCVDQDFKSQKNFIINMTCRFCWQLPETDYECTNSTSCMTVSCPRQRYPANCTVRDHVHCLGNRTFPKMLYCNWTGGYKWSTALALSITLGGFGADRFYLGQWREGLGKLFSFGGLGIWTLIDVLLIGVGYVGPADGSLYI

SEQ ID NO: 69694 - protein, 90 aa, Homo sapiens
KMLALVTLLLGASLQHIHAARGTNVGRECCLEYFKGAIPLRKLKTWYQTSEDCSRDAIVFVTVQGRAICSDPNNKRVKNAVKYLQSLERS

SEQ ID NO: 69695 - protein, 1165 aa, Homo sapiens
ITVMAMALLSGFFFFAPASSYNLDVRGARSFSPPRAGRHFGYRVLQVGNGVIVGAPGEGNSTGSLYQCQSGTGHCLPVTLRGSNYTSKYLGMTLATDPTDGSILACDPGLSRTCDQNTYLSGLCYLFRQNLQGPMLQGRPGFQECIKGNVDLVFLFDGSMSLQPDEFQKILDFMKDVMKKLSNTSYQFAAVQFSTSYKTEFDFSDYVKRKDPDALLKHVKHMLLLTNTFGAINYVATEVFREELGARPDATKVLIIITDGEATDSGNIDAAKDIIRYIIGIGKHFQTKESQETLHKFASKPASEFVKILDTFEKLKDLFTELQKKIYVIEGTSKQDLTSFNMELSSSGISADLSRGHAVVGAVGAKDWAGGFLDLKADLQDDTFIGNEPLTPEVRAGYLGYTVTWLPSRQKTSLLASGAPRYQHMGRVLLFQEPQGGGHWSQVQTIHGTQIGSYFGGELCGVDVDQDGETELLLIGAPLFYGEQRGGRVFIYQRRQLGFEEVSELQGDPGYPLGRFGEAITALTDINGDGLVDVAVGAPLEEQGAVYIFNGRHGGLSPQPSQRIEGTQVLSGIQWFGRSIHGVKDLEGDGLADVAVGAESQMIVLSSRPVVDMVTLMSFSPAEIPVHEVECSYSTSNKMKEGVNITICFQIKSLIPQFQGRLVANLTYTLQLDGHRTRRRGLFPGGRHELRRNIAVTTSMSCTDFSFHFPVCVQDLISPINVSLNFSLWEEEGTPRDQRAQGKDIPPILRPSLHSETWEIPFEKNCGEDKKCEANLRVSFSPARSRALRLTAFASLSVELSLSNLEEDAYWVQLDLHFPPGLSFRKVEMLKPHSQIPVSCEELPEESRLLSRALSCNVSSPIFKAGHSVALQMMFNTLVNSSWGDSVELHANVTCNNEDSDLLEDNSATTIIPILYPINILIQDQEDSTLYVSFTPKGPKIHQVKHMYQVRIQPSIHDHNIPTLEAVVGVPQPPSEGPITHQWSVQMEPPVPCHYEDLERLPDAAEPCLPGALFRCPVVFRQEILVQVIGTLELVGEIEASSMFSLCSSLSISFNSSKHFHLYGSNASLAQVVMKVDVVYEKQMLYLYVLSGIGGLLLLLLIFIVLYKVGFFKRNLKEKMEAGRGVPNGIPAEDSEQLASGQEAGDPGCLKPLHEKDSESGGGKD

SEQ ID NO: 69696 - protein, 36 aa, Homo sapiens
IFNFLKYTLWPCLVLALVPWAVHMFSAQEAPPIHSS

SEQ ID NO: 69697 - protein, 235 aa, Homo sapiens [sequence omitted]

SEQ ID NO: 69698 - protein, 178 aa, Homo sapiens
ILLFILLWHLCWPKEKADPYPYPGLVCGVPNTHTPSSSHLSSPGALETGDTWKEASLLPLLSRELSSLASQPLSRLLDELEVLEELIVLLDPEPGPGGGMAHGTTRHLAARYGLPAAWSTFAYSLRPSRSPLRALIEMVVAREPSASLGQLGTHLAQLGRADALRVLSKLGSSGVCWA

SEQ ID NO: 69699 - protein, 15 aa, Homo sapiens
LLMTARLWGGTLLWT

SEQ ID NO: 69700 - protein, 98 aa, Homo sapiens
LSSWWAKALFVFCGLLTCCYCCCCLCCCFNCCCGKCKPKAPEGEETEFYVSPEDLEAQLQSDEREATDTPIVIQPASATETTQLTADSHPSYHTDGFN

SEQ ID NO: 69701 - protein, 33 aa, Homo sapiens
INYFFFLKLFLSLQNLILALDLRRESLTRDETQ

SEQ ID NO: 69702 - protein, 526 aa, Homo sapiens
MAARRSLSARGRGILQAAAGRLLPLLLLSCCCGAGGCAAVGENEETVIIGLRLEDTNDVSFMEGGALRVSERTRVKLRVYGQNINNETWSRIAFTEHERRRHSPGERGLGGPAPPEPDSGPQRCGIRTSDIIILPHIILNRRTSGIIEIEIKPLRKMEKSKSYYLCTSLSTPALGAGGSGSTGGAVGGKGGSGVAGLPPPPWAETTWIYHDGEDTKMIVGEEKKFLLPFWLQVIFISLLLCLSGMFSGLNLGLMALDPMELRIVQNCGTEKEKNYAKRIEPVRRQGNYLLCSLLLGNVLVNTTLTILLDDIAGSGLVAVVVSTIGIVIFGEIVPQAICSRHGLAVGANTIFLTKFFMMMTFPASYPVSKLLDCVLGQEIGTVYNREKLLEMLRVTDPYNDLVKEELNIIQGALELRTKTVEDVMTPLRDCFMITGEAILDFNTMSEIMESGYTRIPVFEGERSNIVDLLFVKDLAFVDPDDCTPLKTITKFYNHPLHFVFNDTKLDAMLEEFKKEHTNKKPKSYQH

SEQ ID NO: 69703 - protein, 68 aa, Homo sapiens
MTEWFMCIFARTLPWASVLRVWDMFFCEGTSVALQAMRGWGFCGGYQGFCHISGGPWTKGTCWVEVSP

SEQ ID NO: 69704 - protein, 257 aa, Homo sapiens
MNFVTAYVMLFEVANLREGMSVLVHSAGGGVGQAVAQLCSTVPNVTVFGTASTFKHEAIKDSVTHLFDRNADYVQEVKRISAEGVDIVLDCLCGDNTGKGLSLLKPLGTYILYGSSNMVTGETKSFFSFAKSWWQVEKVNPIKLYEENKVIAGFSLLNLLFKQGRAGLIRGVVEKLIGLYNQKKIKPVVDSLWALEEVKEAMQRIHDRGNIGKLILDVEKTPTPLMANDSTETSEAGEEEEDHEGDSENKERMPFIQ

SEQ ID NO: 69705 - protein, 18 aa, Homo sapiens
MALFTILTSIYFFNKAQQ

SEQ ID NO: 69706 - protein, 565 aa, Homo sapiens
MVTVALSVALLALLKWYSTSAFSRLEKLGLRHPKPSPFIGNLTFFRQGFWESQMELRKLYGPLCGYYLGRRMFIVISEPDMIKQVLVENFSNFTNRMASGLEFKSVADSVLFLRDKRWEEVRGALMSAFSPEKLNELGLLIMQERIKGHMGGQQAPQRIPPTRLSKPSGIYVNLHYATLPFCMVPLISQACDLLLAHLKRYAESGDAFDIQRCYCNYTTDVVASVAFGTPVDSWQAPEDPFVKHCKRFFEFCIPRPILVLLLSFPSIMVPLARILPNKNRDELNGFFNKLIRNVIALRDQQAAEERRRDFLQMVLDARHSASPMGVQDFDIVRDVFSSTGCKPNPSRQHQPSPMARPLTVDEIVGQAFIFLIAGYEIITNTLSFATYLLATNPDCQEKLLREVDVFKEKHMAPEFCSLEEGLPYLDMVIAETLRMYPPAFRFTREAAQDCEVLGQRIPAGAVLEMAVGALHHDPEHWPSPETFNPERFTAEARQQHRPFTYLPFGAGPRSCLGVRLGLLEVKLTLLHVLHKFRFQACPETQVPLQLESKSALGPKNGVYIKIVSR

SEQ ID NO: 69707 - protein, 38 aa, Homo sapiens
LFYFFFFFKSYVVSTQNTSLLFLGEGAYVTNRMSPKLD

SEQ ID NO: 69708 - protein, 26 aa, Homo sapiens
TAAAAWMCWVLSKLELRLSYILALPA

SEQ ID NO: 69709 - protein, 17 aa, Homo sapiens
IAVCRFSALAVGSTCVL

SEQ ID NO: 69710 - protein, 23 aa, Homo sapiens
LPGWWLLHIFTVLQSFSFVSIKD

SEQ ID NO: 69711 - protein, 11 aa, Homo sapiens
IAFFLMTFLAS

SEQ ID NO: 69712 - protein, 18 aa, Homo sapiens
ITKVVFPEQGLAILLWMC

SEQ ID NO: 69713 - protein, 197 aa, Homo sapiens
IWSFGCILAELLTGQPLFPGEDEGDQLACMMELLGMPPPKLLEQSKRAKYFINSKGIPRYCSVTTQADGRVVLVGGRSRRGKKRGPPGSKDWGTALKGCDDYLFIEFLKRCLHWDPSARLTPAQALRHPWISKSVPRPLTTIDKVSGKRVVNPASAFQGLGSKLPPVVGIANKLKANLMSETNGSIPLCSVLPKLIS

SEQ ID NO: 69714 - protein, 39 aa, Homo sapiens
ILLHLLIPLTKCFVTDLRLIMQMIVCDNWSSFTNNRFLN

SEQ ID NO: 69715 - protein, 80 aa, Homo sapiens
IGLCICFFCSSGCIFLGSPPQNSTAVTPAVLWEESEIMQKELKLLQYQLSQHQELLLKQLAEGRQAQVGSWKDLHSCCPI

SEQ ID NO: 69716 - protein, 361 aa, Homo sapiens
VVTLILLLLLKVYQGKGCQGSADHVVSISGVPLQLQPNSIQTKVDSIAWKKLLPSQNGFHHILKWENGSLPSNTSNDRFSFIVKNLSLLIKAAQQQDSGLYCLEVTSISGKVQTATFQVFVFDKVEKPRLQGQGKILDRGRCQVALSCLVSRDGNVSYAWYRGSKLIQTAGNLTYLDEEVDINGTHTYTCNVSNPVSWESHTLNLTQDCQNAHQEFRFWPFLVIIVILSALFLGTLACFCVWRRKRKEKQSETSPKEFLTIYEDVKDLKTRRNHEQEQTFPGGGSTIYSMIQSQSSAPTSQEPAYTLYSLIQPSRKSGSRKRNHSPSFNSTIYEVIGKSQPKAQNPARLSRKELENFDVYS

SEQ ID NO: 69717 - protein, 182 aa, Homo sapiens
KLLSLVAVVGCLLVPPAEANKSSEDIRCKCICPPYRNISGHIYNQNVSQKDCNCLHVVEPMPVPGHDVEAYCLLCECRYEERSTTTIKVIIVIYLSVVGALLLYMAFLMLVDPLIRKPDAYTEQLHNEEENEDARSMAAAAASLGGPRANTVLERVEGAQQRWKLQVQEQRKTVFDRHKMLS

SEQ ID NO: 69718 - protein, 16 aa, Homo sapiens
MVTIWNMLTLLMNSCL

SEQ ID NO: 69719 - protein, 31 aa, Homo sapiens
IVFLLQVLLMFKIACQLLSHEFSNKKMKSLC

SEQ ID NO: 69720 - protein, 26 aa, Homo sapiens
ITRLFCGFSCSILCLLDTSELLNKHL

SEQ ID NO: 69721 - protein, 331 aa, Homo sapiens
LSARDGSRMLLLLLLLGSGQGPQQVGAGQTFEYLKREHSLSKPYQGVGTGSSSLWNLMGNAMVMTQYIRLTPDMQSKQGALWNRVPCFLRDWELQVHFKIHGQGKKNLHGDGLAIWYTKDRMQPGPVFGNMDKFVGLGVFVDTYPNEEKQQERVFPYISAMVNNGSLSYDHERDGRPTELGGCTAIVRNLHYDTFLVIRYVKRHLTIMMDIDGKHEWRDCIEVPGVRLPRGYYFGTSSITGDLSDNHDVISLKLFELTVERTPEEEKLHRDVFLPSVDNMKLPEMTAPLPPLSGLALFLIVFFSLVFSVFAIVIGIILYNKWQEQSRKRFY

SEQ ID NO: 69722 - protein, 17 aa, Homo sapiens
ILSYSAFPSSVFLLLGL

SEQ ID NO: 69723 - protein, 6 aa, Homo sapiens
LFILVL

SEQ ID NO: 69724 - protein, 302 aa, Homo sapiens
LSGFVAGAVVGAAGAGLAALQFFRSQGAEGALTGKQPDGDADRKHCKFKPDPNIPPTFSAFNEDYVGSGWSRGHMAPAGNNKFSSKAMAETFYLSNIVPQDFDNNSGYWNRIEMYCRELTERFEDVWVVSGPLTLPQTRGDGKKIVSYQVIGEDNVAVPSHLYKVILARRSSVSTEPLALGAFVVPNEAIGFQPQLTEFQVSLQDLEKLSGLVFFPHLDRTSDIRNICSVDTCKLLDFQEFTLYLSTRKIEGARSVLRLEKIMENLKNAEIEPDDYFMSRYEKKLEELKAKEQSGTQIRKPS

SEQ ID NO: 69725 - protein, 20 aa, Homo sapiens
VKSVALLGFCQGLLLLTILQ

SEQ ID NO: 69726 - protein, 12 aa, Homo sapiens
VFITSVWVQAVL

SEQ ID NO: 69727 - protein, 120 aa, Homo sapiens
LLLLLLPPLLLTPRAGDAAVITGACDKDSQCGGGMCCAVSIWVKSIRICTPMGKLGDSCHPLTRKNNFGNGRQERRKRKRSKRKKEVPFFGRRMHHTCPCLPGLACLRTSFNRFICLAQK

SEQ ID NO: 69728 - protein, 286 aa, Homo sapiens
LPAMLGTGKLFWVFFLIPYLDIWNIHGKESCDVQLYIKRQSEHSILAGDPFELECPVKYCANRPHVTWCKLNGTTCVKLEDRQTSWKEEKNISFFILHFEPVLPNDNGSYRCSANFQSNLIESHSTTLYVTDVKSASERPSKDEMASRPWLLYRLLPLGGLPLLITTCFCLFCCLRRHQGKQNELSDTAGREINLVDAHLKSEQTEASTRQNSQVLLSETGIYDNDPDLCFRMQEGSEVYSNPCLEENKPGIVYASLNHSVIGPNSRLARNVKEAPTEYASICVRS

SEQ ID NO: 69729 - protein, 15 aa, Homo sapiens
KFAFDFFFFPFLSAA

SEQ ID NO: 69730 - protein, 17 aa, Homo sapiens
IFLTIAYLKLLFLKKYS

SEQ ID NO: 69731 - protein, 84 aa, Homo sapiens
IFLLFSPILAQSGAIVLLVRPSLKMRSREAGPKLRRIQEPANGSPALRCGDNGEALGMVGCRYVIPEEQESNRIRRLLIQGTLF

SEQ ID NO: 69732 - protein, 63 aa, Homo sapiens
LLEPLWLLSAEWKRVLLFVSLAMALQLSREQGITLRGSAEIVAEFFLHPEKSLRKLSRMKSVQ

SEQ ID NO: 69733 - protein, 419 aa, Homo sapiens
VARDLKMRLHLLLLLALCGAGTTAAELSYSLRGNWSICNGNGSLELPGAVPGCVHSALFQQGLIQDSYYRFNDLNYRWVSLDNWTYSKEFKIPFEISKWQKVNLILEGVDTVSKILFNEVTIGETDNMFNRYSFDITNVVRDVNSIELRFQSAVLYAAQQSKAHTRYQVPPDCPPLVQKGECHVNFVRKEQCSFSWDWGPSFPTQGIWKDVRIEAYNICHLNYFTFSPIYDKSAQEWNLEIESTFDVVSSKPVGGQVIVAIPKLQTQQTYSIELQPGKRIVELFVNISKNITVETWWPHGHGNQTGYNMTVLFELDGGLNIEKSAKVYFRTVELIEEPIKGSPGLSFYFKINGFPIFLKGSNWIPADSFQDRVTSELLRLLLQSVVDANMNTLRVWGGGIYEQDEFYELCDELGIMVCI

SEQ ID NO: 69734 - protein, 12 aa, Homo sapiens
IAGINFKLLFLF

SEQ ID NO: 69735 - protein, 12 aa, Homo sapiens
ITLRLLLAMTAS

SEQ ID NO: 69736 - protein, 42 aa, Homo sapiens
VQAVFSVFFMASKILQKRFMAASLPVVSAFSEIRNGFSSVYC

SEQ ID NO: 69737 - protein, 27 aa, Homo sapiens
IFSFLWILYWKKTMTIQDQIFKFKPRD

SEQ ID NO: 69738 - protein, 19 aa, Homo sapiens
LILYFGTVPWMVLFIKRET

SEQ ID NO: 69739 - protein, 301 aa, Homo sapiens
LVLPWVLLTLCVTAGTPEVWVQVRMEATELSSFTIRCGFLGSGSISLVTVSWGGPNGAGGTTLAVLHPERGIRQWAPARQARWETQSSISLILEGSGASSPCANTTFCCKFASFPEGSWEACGSLPPSSDPGLSAPPTPAPILRADLAGILGVSGVLLFGCVYLLHLLRRHKHRPAPRLQPSRTSPQAPRARAWAPSQASQAALHVPYATINTSCRPATLDTAHPHGGPSWWASLPTHAAHRPQGPAAWASTPIPARGSFVSVENGLYAQAGERPPHTGPGLTLFPDPRGPRAMEGPLGVR

SEQ ID NO: 69740 - protein, 35 aa, Homo sapiens
LNTLAAVVTVFYLVAYAAVDLSCLSLEWASAPNFR

SEQ ID NO: 69741 - protein, 213 aa, Homo sapiens
VFLLTFYVISQVFEIKMDASLGNLFARSALDTAARSTKPPRYKCGISKACPEKHFAFKMASGAANVVGPKICLEDNVLMSGVKNNVGRGINVALANGKTGEVLDTKYFDMWGGDVAPFIEFLKAIQDGTIVLMGTYDDGATKLNDEARRLIADLGSTSITNLGFRDNWVFCGGKGIKTKSPFEQHIKNNKDTNKYEGWPEVVEMEGCIPQKQD

SEQ ID NO: 69742 - protein, 34 aa, Homo sapiens
IFFLSAVPLVCLELRRGIPDIGKCDFFPSTVTAG

SEQ ID NO: 69743 - protein, 19 aa, Homo sapiens
LNCLFCLHPLFLIFIMSCA

SEQ ID NO: 69744 - protein, 372 aa, Homo sapiens
VAVCALHLGVTLVYYLAGRDLSRLPQLVGVSTPLQGGSNSAAAIGQSSGELRTGGARPPPPLGASSQPRPGGDSSPVVDSGPGPASNLTSVPVPHTTALSLPACPEESPLLVGPMLIEFNMPVDLELVAKQNPNVKMGGRYAPRDCVSPHKVAIIIPFRNRQEHLKYWLYYLHPVLQRQQLDYGIYVINQAGDTIFNRAKLLNVGFQEALKDYDYTCFVFSDVDLIPMNDHNAYRCFSQPRHISVAMDKFGFSLPYVQYFGGVSALSKQQFLTINGFPNNYWGWGGEDDDIFNRLVFRGMSISRPNAVVGRCRMIRHSRDKKNEPNPQRFDRIAHTKETMLSDGLNSLTYQVLDVQRYPLYTQITVDIGTPS

SEQ ID NO: 69745 - protein, 321 aa, Homo sapiens
LPPPSPRHLRLLRLLLSGLVLGAALRGAAAGHPDVAACPGSLDCALKRRARCPPGAHACGPCLQPFQEDQQGLCVPRMRRPPGGGRPQPRLEDEIDFLAQELARKESGHSTPPLPKDRQRLPEPATLGFSARGQGLELGLPSTPGTPTPTPHTSLGSPVSSDPVHMSPLEPRGGQGDGLALVLILAFCVAGAAALSVASLCWCRLQREIRLTQKADYATAKAPGSPAAPRISPGDQRLAQSAEMYHYQHQRQQMLCLERHKEPPKELDTASSDEENEDGDFTVYECPGLAPTGEMEVRNPLFDHAALSAPLPAPSSPPALP

SEQ ID NO: 69746 - protein, 428 aa, Homo sapiens
LLARLLLCVLVVSDSKGSNELHQVPSNCDCLNGGTCVSNKYFSNIHWCNCPKKFGGQHCEIDKSKTCYEGNGHFYRGKASTDTMGRPCLPWNSATVLQQTYHAHRSDALQLGLGKHNYCRNPDNRRRPWCYVQVGLKLLVQECMVHDCADGKKPSSPPEELKFQCGQKTLRPRFKIIGGEFTTIENQPWFAAIYRRHRGGSVTYVCGGSLISPCWVISATHCFIDYPKKEDYIVYLGRSRLNSNTQGEMKFEVENLILHKDYSADTLAHHNDIALLKIRSKEGRCAQPSRTIQTICLPSMYNDPQFGTSCEITGFGKENSTDYLYPEQLKMTVVKLISHRECQQPHYYGSEVTTKMLCAADPQWKTDSCQGDSGGPLVCSLQGRMTLTGIVSWGRGCALKDKPGVYTRVSHFLPWIRSHTKEENGLAL

SEQ ID NO: 69747 - protein, 41 aa, Homo sapiens
KHFFLFLVLCNVSGIGSVISMSISTRKHCLDEVWWKPGSPF

SEQ ID NO: 69748 - protein, 41 aa, Homo sapiens
LLIFFSWCVWWLFLSVEGKRRYHPRLSPTPLQNGFSDTPAV

SEQ ID NO: 69749 - protein, 307 aa, Homo sapiens
TALEAGSWRWGSLLFALFLAASLGPVAAFKVATPYSLYVCPEGQNVTLTCRLLGPVDKGHDVTFYKTWYRSSRGEVQTCSERRPIRNLTFQDLHLHHGGHQAANTSHDLAQRHGLESASDHHGNFSITMRNLTLLDSGLYCCLVVEIRHHHSEHRVHGAMELQVQTGKDAPSNCVVYPSSSQDSENITAAALATGACIVGILCLPLILLLVYKQRQAASNRRAQELVRMDSNIQGIENPGFEASPPAQGIPEAKVRHPLSYVAQRQPSESGRHLLSEPSTPLSPPGPGDVFFPSLDPVPDSPNFEVI

SEQ ID NO: 69750 - protein, 596 aa, Homo sapiens
VLALALALALALALSDSRVLWAPAEAHPLSPQGHPARLHRIVPRLRDVFGWGNLTCPICKGLFTAINLGLKKEPNVARVGSVAIKLCNLLKIAPPAVCQSIVHLFEDDMVEVWRRSVLSPSEACGLLLGSTCGHWDIFSSWNISLPTVPKPPPKPPSPPAPGAPVSRILFLTDLHWDHDYLEGTDPDCADPLCCRRGSGLPPASRPGAGYWGEYSKCDLPLRTLESLLSGLGPAGPFDMVYWTGDIPAHDVWHQTRQDQLRALTTVTALVRKFLGPVPVYPAVGNHESTPVNSFPPPFIEGNHSSRWLYEAMAKAWEPWLPAEALRTLRIGGFYALSPYPGLRLISLNMNFCSRENFWLLINSTDPAGQLQWLVGELQAAEDRGDKVHIIGHIPPGHCLKSWSWNYYRIVARYENTLAAQFFGHTHVDEFEVFYDEETLSRPLAVAFLAPSATTYIGLNPGYRVYQIDGNYSGSSHVVLDHETYILNLTQANIPGAIPHWQLLYRARETYGLPNTLPTAWHNLVYRMRGDMQLFQTFWFLYHKGHPPSEPCGTPCRLATLCAQLSARADSPALCRHLMPDGSLPEAQSLWPRPLFC

SEQ ID NO: 69751 - protein, 9 aa, Homo sapiens
MVNLLFFLS

SEQ ID NO: 69752 - protein, 752 aa, Homo sapiens
TGRLLLLLLVGLTAPALALAGYIEALAANAGTGFAVAEPQIAMFCGKLNMHVNIQTGKWEPDPTGTKSCFETKEEVLQYCQEMYPELQITNVMEANQRVSIDNWCRRDKKQCKSRFVTPFKCLVGEFVSDVLLVPEKCQFFHKERMEVCENHQHWHTVVKEACLTQGMTLYSYGMLLPCGVDQFHGTEYVCCPQTKIIGSVSKEEEEEDEEEEEEEDEEEDYDVYKSEFPTEADLEDFTEAAVDEDDEDEEEGEEVVEDRDYYYDTFKGDDYNEENPTEPGSDGTMSDKEITHDVKAVCSQEAMTGPCRAVMPRWYFDLSKGKCVRFIYGGCGGNRNNFESEDYCMAVCKAMIPPTPLPTNDVDVYFETSADDNEHARFQKAKEQLEIRHRNRMDRVKKEWEEAELQAKNLPKAERQTLIQHFQAMVKALEKEAASEKQQLVETHLARVEAMLNDRRRMALENYLAALQSDPPRPHRILQALRRYVRAENKDRLHTIRHYQHVLAVDPEKAAQMKSQVMTHLHVIEERRNQSLSLLYKVPYVAQEIQEEIDELLQEQRADMDQFTASISETPVDVRVSSEESEEIPPFHPFHPFPALPENEDTQPELYHPMKKGSGVGEQDGGLIGAEEKVINSKNKVDENMVIDETLDVKEMIFNAERVGGLEEERESVGPLREDFSLSSSALIGLLVIAVAIATVIVISLVMLRKRQYGTISHGIVEVDPMLTPEERHLNKMQNHGYENPTYKYLEQMQI

SEQ ID NO: 69753 - protein, 32 aa, Homo sapiens
KWKLRLWMTFSLAAMSCWLSLVPSSLEASSWF

SEQ ID NO: 69754 - protein, 25 aa, Homo sapiens
LTAVLLSVLLYQWILCQEPAPSFPQ

SEQ ID NO: 69755 - protein, 668 aa, Homo sapiens
KMAAETLLSSLLGLLLLGLLLPASLTGGVGSLNLEELSEMRYGIEILPLPVMGGQSQSSDVVIVSSKYKQRYECRLPAGAIHFQREREEETPAYQGPGIPELLSPMRDAPCLLKTKDWWTYEFCYGRHIQQYHMEDSEIKGEVLYLGYYQSAFDWDDETAKASKQHRLKRYHSQTYGNGSKCDLNGRPREAEVRFLCDEGAGISGDYIDRVDEPLSCSYVLTIRTPRLCPHPLLRPPPSAAPQAILCHPSLQPEEYMAYVQRQADSKQYGDKIIEELQDLGPQVWSETKSGVAPQKMAGASPTKDDSKDSDFWKMLNEPEDQAPGGEEVPAEEQDPSPEAADSASGAPNDFQNNVQVKVIRSPADLIRFIEELKGGTKKGKPNIGQEQPVDDAAEVPQREPEKERGDPERQREMEEEEDEDEDEDEDEDERQLLGEFEKELEGILLPSDRDRLRSEVKAGMERELENIIQETEKELDPDGLKKESERDRAMLALTSTLNKLIKRLEEKQSPELVKKHKKKRVVPKKPPPSPQPTEEDPEHRVRVRVTKLRLGGPNQDLTVLEMKRENPQLKQIEGLVKELLEREGLTAAGKIEIKIVRPWAEGTEEGARWLTDEDTRNLKEIFFNILVPGAEEAQKERQRQKELESNYRRVWGSPGGEGTGDLDEFDF

SEQ ID NO: 69756 - protein, 155 aa, Homo sapiens
ICLILMASVVTIVVIPSTLIQRHNNSSLNTRTQKARHCGHCPEEWITYSNSCYYIGKERRTWEESLLACTSKNSSLLSIDNEEEMKFLSIISPSSWIGVFRNSSHHPWVTMNGLAFKHEIKDSDNAELNCAVLQVNRLKSAQCGSSIIYHCKHKL

SEQ ID NO: 69757 - protein, 612 aa, Homo sapiens
LRLAMVGCAFVLFLFLLHRDVSSREEATEKPWLKSLVSRKDHVLDLMLEAMNNLRDSMPKLQIRAPEAQQTLFSINQSCLPGFYTPAELKPFWERPPQDPNAPGADGKAFQKSKWTPLETQEKEEGYKKHCFNAFASDRISLQRSLGPDTRPPECVDQKFRRCPPLATTSVIIVFHNEAWSTLLRTVYSVLHTTPAILLKEIILVDDASTEEHLKEKLEQYVKQLQVVRVVRQEERKGLITARLLGASVAQAEVLTFLDAHCECFHGWLEPLLARIAEDKTVVVSPDIVTIDLNTFEFAKPVQRGRVHSRGNFDWSLTFGWETLPPHEKQRRKDETYPIKSPTFAGGLFSISKSYFEHIGTYDNQMEIWGGENVEMSFRVWQCGGQLEIIPCSVVGHVFRTKSPHTFPKGTSVIARNQVRLAEVWMDSYKKIFYRRNLQAAKMAQEKSFGDISERLQLREQLHCHNFSWYLHNVYPEMFVPDLTPTFYGAIKNLGTNQCLDVGENNRGGKPLIMYSCHGLGGNQYFEYTTQRDLRHNIAKQLCLHVSKGALGLGSCHFTGKNSQVPKDEEWELAQDQLIRNSGSGTCLTSQDKKPAMAPCNPSDPHQLWLFV

SEQ ID NO: 69758 - protein, 17 aa, Homo sapiens
ILLWEMLLLMLLYKVIQ

SEQ ID NO: 69759 - protein, 10 aa, Homo sapiens
VLIAWGVLIT

SEQ ID NO: 69760 - protein, 48 aa, Homo sapiens
LRPALPWLYLGLCSLLVGEAEAPSPVDPLERSRPYAVLRGQNLDQTLH

SEQ ID NO: 69761 - protein, 87 aa, Homo sapiens
TLKMKGWGWLALLLGALLGTAWARRSQDLHCGACRALVDELEWEIAQVDPKKTIQMGSFRINPDGSQSVVEVTVTVPPNKVAHSGFG

SEQ ID NO: 69762 - protein, 111 aa, Homo sapiens
LIAVGLGVAALAFAGRYAFRIWKPLEQVITETAKKISTPSFSSYYKGGFEQKMSRREAGLILGVSPSAGKAKIRTAHRRVMILNHPDKGGSPYVAAKINEAKDLLETTTKH

SEQ ID NO: 69763 - protein, 22 aa, Homo sapiens
VMGWCLLTFSLSLPTVLIDNFK

SEQ ID NO: 69764 - protein, 23 aa, Homo sapiens
MERPLFTLWLSICSLLCLYGPIG

SEQ ID NO: 69765 - protein, 24 aa, Homo sapiens
IWGFVFPFFLLHPPPFLKVNESLR

SEQ ID NO: 69766 - protein, 17 aa, Homo sapiens
LLFAFGLASFIFLIHRG

SEQ ID NO: 69767 - protein, 13 aa, Homo sapiens
LVLTAFTVSFMGS

SEQ ID NO: 69768 - protein, 177 aa, Homo sapiens
RAALLLFTALATSLGFNLDTEELTAFRVDSAGFGDSVVQYANSWVVVGAPQKITAANQTGGLYQCGYSTGACEPIGLQVPPEAVNMSLGLSLASTTSPSQLLLTQRLPVSRQGECRDHQGFEELTHIQLGVRWARDSLARVDQKEGIWKKSYHVLQWFLTLLPAHPADRPHAAGPFL

SEQ ID NO: 69769 - protein, 45 aa, Homo sapiens
VFGFFATIVFATDFYLIFNDVAKFLKQGDSADETTAHKTEGKRLP

SEQ ID NO: 69770 - protein, 36 aa, Homo sapiens
RFLTWVHWMTLRFGVLLIPSCRLHCCDPSSSPKDAS

SEQ ID NO: 69771 - protein, 1214 aa, Homo sapiens
LLGPAVVTAAVVLLLSGVGPAHGSEDIVVGCGGFVKSDVEINYSLIEIKLYTKHGTLKYQTDCAPNNGYFMIPLYDKGDFILKIEPPLGWSFEPTTVELHVDGVSDICTKGGDINFVFTGFSVNGKVLSKGQPLGPAGVQVSLRNTGTEAKIQSTVTQPGGKFAFFKVLPGDYEILATHPTWALKEASTTVRVTNSNANAASPLIVAGYNVSGSVRSDGEPMKGVKFLLFSSLVTKEDVLGCNVSPVPGFQPQDESLVYLCYTVSREDGSFSFYSLPSGGYTVIPFYRGERITFDVAPSRLDFTVEHDSLKIEPVFHVMGFSVTGRVLNGPEGDGVPEAVVTLNNQIKVKTKADGSFRLENITTGTYTIHAQKEHLYFETVTIKIAPNTPQLADIVATGFSVCGRISIIRFPDTVKQMNKYKVVLSSQDKDKSLVTVETDAHGSFCFKAKPGTYKVQVMVPEAETRAGLTLKPQTFPLTVTDRPVMDVAFVQFLASVSGKVSCLDTCGDLLVTLQSLSRQGEKRSLQLSGKVNAMTFTFDNVLPGKYKISIMHEDWCWKNKSLEVEVLEDDVSAVEFRQTGYMLRCSLSHAITLEFYQDGNGRENVGIYNLSKGVNRFCLSKPGVYKVTPRSCHRFEQAFYTYDTSSPSILTLTAIRHHVLGTITTDKMMDVTVTIKSSIDSEPALVLGPLKSVQELRREQQLAEIEARRQEREKNGNEEGEERMTKPPVQEMVDELQGPFSYDFSYWARSGEKITVTPSSKELLFYPPSMEAVVSGESCPGKLIEIHGKAGLFLEGQIHPELEGVEIVISEKGASSPLITVFTDDKGAYSVGPLHSDLEYTVTSQKEGYVLTAVEGTIGDFKAYALAGVSFEIKAEDDQPLPGVLLSLSGGLFRSNLLTQDNGILTFSNLSPGQYYFKPMMKEFRFEPSSQMIEVQEGQNLKITITGYRTAYSCYGTVSSLNGEPEQGVAMEAVGQNDCSIYGEDTVTDEEGKFRLRGLLPGCVYHVQLKAEGNDHIERALPHHRVIEVGNNDIDDVNIIVFRQINQFDLSGNVITSSEYLPTLWVKLYKSENLDNPIQTVSLGQSLFFHFPPLLRDGENYVVLLDSTLPRSQYDYILPQVSFTAVGYHKHITLIFNPTRKLPEQDIAQGSYIALPLTLLVLLAGYNHDKLIPLLLQLTSRLQGVGALGQAASDNSGPEDAKRQAKKQKTRRT

SEQ ID NO: 69772 - protein, 1214 aa, Homo sapiens; identical to SEQ ID NO: 69771

SEQ ID NO: 69773 - protein, 901 aa, Homo sapiens
IQFRSLFPLALPGMLALLGWWWFFSRKKGHVSSHDEQQVEAGAVQLRADPAIKEPLPVEDVCPKVVSTPPSVTEPPEKELSTVSKLPAEPPALLQTHPPCRRSESSGILPNTTDMRLRPGTRRDDSTKLELALTGGEAKSIPLECPLSSPKGVLFSSKSAEVCKQDSPFSRVPRKVQPGYPVVPAEKRSSGERARETGGAEGTGDAVLGEKVLEEALLSREHVLELENSKGPSLASLEGEEDKGKSSSSQVVGPVQEEEYVAEKLPSRFIESAHTELAKDDAAPAPPVADAKAQDRGVEGELGNEESLDRNEEGLDRNEEGLDRNEESLDRNEEGLDRNEEIKRAAFQIISQVISEATEQVLATTVGKVAGRVCQASQLQGQKEESCVPVHQKTVLGPDTAEPATAEAAVAPPDAGLPLPGLPAEGSPPPKTYVSCLKSLLSSPTKDSKPNISAHHISLASCLALTTPSEELPDRAGILVEDATCVTCMSDSSQSVPLVASPGHCSDSFSTSGLEDSCTETSSSPRDKAITPPLPESTVPFSNGVLKGELSDLGAEDGWTMDAEADHSGGSDRNSMDSVDSCCSLKKTESFQNAQAGSNPKKVDLIIWEIEVPKHLVGRLIGKQGRYVSFLKQTSGAKIYISTLPYTQSVQICHIEGSQHHVDKALNLIGKKFKELNLTNIYAPPLPSLALPSLPMTSWLMLPDGITVEVIVVNQVNAGHLFVQQHTHPTFHALRSLDQQMYLCYSQPGIPTLPTPVEITVICAAPGADGAWWRAQVVASYEETNEVEIRYVDYGGYKRVKVDVLRQIRSDFVTLPFQGAEVLLDSVMPLSDDDQFSPEADAAMSEMTGNTALLAQVTSYSPTGLPLIQLWSVVGDEVVLINRSLVERGLAQWVDSYYTSL

SEQ ID NO: 69774 - protein, 33 aa, Homo sapiens
LKTNVTFPLDILLLSFKAEVCFVLLLQCIFQDC

SEQ ID NO: 69775 - protein, 306 aa, Homo sapiens
IPNAWGRLTRNVLGLCLLALERGYYPVIFHRRGHHGCPLVSPRLQPFGDPSDLKEAVTYIRFRHPAAPLFAVSEGSGSALLLSYLGECGSSSYVTGAACISPVLRCREWFEAGLPWPYERGFLLHQKIALSRYATALEDTVDTSRLFRSRSLREFEEALFCHTKSFPISWDTYWDRNDPLRDVDEAAVPVLCICSADDPVCGPPDHTLTTELFHSNPYFFLLLSRHGGHCGFLRQEPLPAWSHEVILESFRALTEFFRTEERIKGLSRHRASFLGGRRRGGALQRREVSSSSNLEEIFNWKRSYTR

SEQ ID NO: 69776 - protein, 287 aa, Homo sapiens
RTAGLGAGFVLTALLLWSSLGADDGVAEVLARRGEVVAGRFIEVPCSEDYDSHRRFEGCTPRKCGRGVTDVVITREEAERIRSVAEKGLSLGGSDGGASILDLHSGALSVGKHFVNLYRYFGDKIQNIFSEEDFRLYREVRQKVQLTIAEAFGISASSLHLTKPTFFSRINSTEARTAHDEYWHAHVDKVTYGSFDYTSLLYLSNYLEDFGGGRFMFMEEGANKTVEPRAGCFCFRMMSCGFQEVNGPRASEAAGAKAGVRCPPGTHHPPERGETHAILEAESIAYC

SEQ ID NO: 69777 - protein, 189 aa, Homo sapiens
KRQLGRLLLLLRVLDPLLCDFLDSQDSGSLCFCFRWLLIWFKREFPFPDVLRLWEVLWTGLPGPNLHLLVACAILDMERDTLMLSGFGSNEILKHINELTMKLSVEDVLTRAEALHRQLTACPELPHNVQEILGLAPPAEPHSPSPTASPLPLSPTRAPPTPPPSTDTAPQPDSSLEILPEEEDEGADS

SEQ ID NO: 69778 - protein, 30 aa, Homo sapiens
ILGTNMLLFPLFLLLSLDLCQKEGYAESLI

SEQ ID NO: 69779 - protein, 321 aa, Homo sapiens
TALLILQALLLPSLADGATPALRFVAVGDWGGVPNAPFHTAREMANAKEIARTVQILGADFILSLGDNFYFTGVQDINDKRFQETFEDVFSDRSLRKVPWYVLAGNHDHLGNVSAQIAYSKISKRWNFPSPFYRLHFKIPQTNVSVAIFMLDTVTLCGNSDDFLSQQPERPRDVKLARTQLSWLKKQLAAAREDYVLVAGHYPVWSIAEHGPTHCLVKQLRPLLATYGVTAYLCGHDHNLQYLQDENGVGYVLSGAGNFMDPSKRHQRKVPNGYLRFHYGTEDSLGGFAYVEISSKEMTVTYIEASGKSLFKTRLPRRARP

SEQ ID NO: 69780 - protein, 366 aa, Homo sapiens
VFGSPAITAPQMGPGRCLLTALLLLALAPPPEASQYCGRLEYWNPDNKCCSSCLQRFGPPPCPDYEFRENCGLNDHGDFVTPPFRKCSSGQCNPDGAELCSPCGGGAVTPTPAAGGGRTPWRCRERPVPAKGHCPLTPGNPGAPSSQERSSPASSIAWRTPEPVPQQAWPNFLPLVVLVLLLTLAVIAILLFILLWHLCWPKEKADPYPYPGLVCGVPNTHTPSSSHLSSPGALETGDTWKEASLLPLLSRELSSLASQPLSRLLDELEVLEELIVLLDPEPGPGGGMAHGTTRHLAARYGLPAAWSTFAYSLRPSRSPLRALIEMVVAREPSASLGQLGTHLAQLGRADALRVLSKLGSSGVCWA

SEQ ID NO: 69781 - protein, 689 aa, Homo sapiens
LICCRMGLSAAAPLWGPPGLLLAIALHPALSVPPRRDYCVLGAGPAGLQMAYFLQRAGRDYAVFERAPRPGSFFTRYPRHRKLISINKRYTGKANAEFNLRHDWNSLLSHDPRLLFRHYSRAYFPDARDMVRYLGDFADTLGLRVQYNTTIAHVTLDKDRQAWNGHYFILTDQKGQVHQCSVLFVATGLSVPNQVDFPGSEYAEGYESVSVDPEDFVGQNVLILGRGNSAFETAENILGVTNFIHMLSRSRVRLSWATHYVGDLRAINNGLLDTYQLKSLDGLLESDLTDLAILKDSKGKFHVTPKFFLEEANTNQSADSITLPQDDNDNFAMRVPYDRVIRCLGWNFDFSIFNKSLRLNSGNAFGKKYPLIRASYESKGSRGLFILGTASHSVDYRKSAGGFIHGFRYTVRAVHRLLEHRHHSVTWPATELPITQLTSSIVRRVNEASGLYQMFGVLADVILLKENSTAFEYLEEFPIQMLAQLETLTGRKAKHGLFVINMEYGRNFSGPDKDVFFDDRSVGHTEDAWQSNFLHPVIYYYRYLPTEQEVRFRPAHWPLPRPTAIHHIVEDFLTDWTAPIGHILPLRRFLENCLDTDLRSFYAESCFLFALTRQKLPPFCQQGYLRMQGLVSTESLWQHRVESRLLRDYAPTGRRLEDSSQQLGDQEPLGSPLAPGPLAQSVDSNKEEL

SEQ ID NO: 69782 - protein, 20 aa, Homo sapiens
IAVLSRLGLLWTSLPVRCLV

SEQ ID NO: 69783 - protein, 18 aa, Homo sapiens
IGLASFSLLALGPAGTKL

SEQ ID NO: 69784 - protein, 106 aa, Homo sapiens
IGMIMVVTAAFLVSFMPYHIQRTIHLHFLHNETKPCDSVLRMQKSVVITLSLAASNCCFDPLLYFFSGGNFRKRLSTFRKHSLSSVTYVPRKKASLPEKGEEICKV

SEQ ID NO: 69785 - protein, 9 aa, Homo sapiens
IFLFLILEM

SEQ ID NO: 69786 - protein, 41 aa, Homo sapiens
MLPTLTAPTLALLLLPKISCLLTSTHPRTQGSRAHFPRAWR

SEQ ID NO: 69787 - protein, 236 aa, Homo sapiens
MVIIMACVGFFLLQGAWPQEGVHRKPSFLALPGHLVKSEETVILQCWSDVMFEHFLLHREGKFNNTLHLIGEHHDGVSKANFSIGPMMPVLAGTYRCYGSVPHSPYQLSAPSDPLDMVIIGLYEKPSLSAQPGPTVQAGENVTLSCSSIYPGKGRPMNVGSLQCAASTEHSRPTFLWALPPTEGPTDASALSVTLPTSGQTRVIHCLFPSQETLQIVGLHPLNQAPKPVTPDTYMF

SEQ ID NO: 69788 - protein, 9 aa, Homo sapiens
LPTLLLLGF

SEQ ID NO: 69789 - protein, 12 aa, Homo sapiens
VFLIAALLPLWM

SEQ ID NO: 69790 - protein, 13 aa, Homo sapiens
TFQGLWFCDLFLC

SEQ ID NO: 69791 - protein, 11 aa, Homo sapiens
VWCLFLVLIRS

SEQ ID NO: 69792 - protein, 199 aa, Homo sapiens
IDIWSFGCILAELLTGQPLFPGEDEGDQLACMMELLGMPPPKLLEQSKRAKYFINSKGIPRYCSVTTQADGRVVLVGGRSRRGKKRGPPGSKDWGTALKGCDDYLFIEFLKRCLHWDPSARLTPAQALRHPWISKSVPRPLTTIDKVSGKRVVNPASAFQGLGSKLPPVVGIANKLKANLMSETNGSIPLCSVLPKLIS

SEQ ID NO: 69793 - protein, 10 aa, Homo sapiens
RRKAILWLGM

SEQ ID NO: 69794 - protein, 20 aa, Homo sapiens
MEILQVLLTILRLQSLNVVM

SEQ ID NO: 69795 - protein, 27 aa, Homo sapiens
LVLLLFLVKTLSCLKELLLMDQFHTPP

SEQ ID NO: 69796 - protein, 305 aa, Homo sapiens
ILVLLLVAGALTALLPSVKEDKMLMLRREIKSQGKSTMDSFTLIMQTYNRTDLLLKLLNHYQAVPNLHKVIVVWNNIGEKAPDELWNSLGPHPIPVIFKQQTANRMRNRLQVFPELETNAVLMVDDDTLISTPDLVFAFSVWQQFPDQIVGFVPRKHVSTSSGIYSYGSFEMQAPGSGNGDQYSMVLIGASFFNSKYLELFQRQPAAVHALIDDTQNCDDIAMNFIIAKHIGKTSGIFVKPVNMDNLEKETNSGYSGMWHRAEHALQRSYCINKLVNIYDSMPLRYSNIMISQFGFPYANYKRKI

SEQ ID NO: 69797 - protein, 2468 aa, Homo sapiens
LRPALLWALLALWLCCAAPAHALQCRDGYEPCVNEGMCVTYHNGTGYCKCPEGFLGEYCQHRDPCEKNRCQNGGTCVAQAMLGKATCRCASGFTGEDCQYSTSHPCFVSRPCLNGGTCHMLSRDTYECTCQVGFTGKECQWTDACLSHPCANGSTCTTVANQFSCKCLTGFTGQKCETDVNECDIPGHCQHGGTCLNLPGSYQCQCPQGFTGQYCDSLYVPCAPSPCVNGGTCRQTGDFTFECNCLPGFEGSTCERNIDDCPNHRCQNGGVCVDGVNTYNCRCPPQWTGQFCTEDVDECLLQPNACQNGGTCANRNGGYGCVCVNGWSGDDCSENIDDCAFASCTPGSTCIDRVASFSCMCPEGKAGLLCHLDDACISNPCHKGALCDTNPLNGQYICTCPQGYKGADCTEDVDECAMANSNPCEHAGKCVNTDGAFHCECLKGYAGPRCEMDINECHSDPCQNDATCLDKIGGFTCLCMPGFKGVHCELEINECQSNPCVNNGQCVDKVNRFQCLCPPGFTGPVCQIDIDDCSSTPCLNGAKCIDHPNGYECQCATGFTGVLCEENIDNCDPDPCHHGQCQDGIDSYTCICNPGYMGAICSDQIDECYSSPCLNDGRCIDLVNGYQCNCQPGTSGVNCEINFDDCASNPCIHGICMDGINRYSCVCSPGFTGQRCNIDIDECASNPCRKGATCINGVNGFRCICPEGPHHPSCYSQVNECLSNPCIHGNCTGGLSGYKCLCDAGWVGINCEVDKNECLSNPCQNGGTCDNLVNGYRCTCKKGFKGYNCQVNIDECASNPCLNQGTCFDDISGYTCHCVLPYTGKNCQTVLAPCSPNPCENAAVCKESPNFESYTCLCAPGWQGQRCTIDIDECISKPCMNHGLCHNTQGSYMCECPPGFSGMDCEEDIDDCLANPCQNGGSCMDGVNTFSCLCLPGFTGDKCQTDMNECLSEPCKNGGTCSDYVNSYTCKCQAGFDGVHCENNINECTESSCFNGGTCVDGINSFSCLCPVGFTGSFCLHEINECSSHPCLNEGTCVDGLGTYRCSCPLGYTGKNCQTLVNLCSRSPCKNKGTCVQKKAESQCLCPSGWAGAYCDVPNVSCDIAASRRGVLVEHLCQHSGVCINAGNTHYCQCPLGYTGSYCEEQLDECASNPCQHGATCSDFIGGYRCECVPGYQGVNCEYEVDECQNQPCQNGGTCIDLVNHFKCSCPPGTRGLLCEENIDDCARGPHCLNGGQCMDRIGGYSCRCLPGFAGERCEGDINECLSNPCSSEGSLDCIQLTNDYLCVCRSAFTGRHCETFVDVCPQMPCLNGGTCAVASNMPDGFICRCPPGFSGARCQSSCGQVKCRKGEQCVHTASGPRCFCPSPRDCESGCASSPCQHGGSCHPQRQPPYYSCQCAPPFSGSRCELYTAPPSTPPATCLSQYCADKARDGVCDEACNSHACQWDGGDCSLTMENPWANCSSPLPCWDYINNQCDELCNTVECLFDNFECQGNSKTCKYDKYCADHFKDNHCDQGCNSEECGWDGLDCAADQPENLAEGTLVIVVLMPPEQLLQDARSFLRALGTLLHTNLRIKRDSQGELMVYPYYGEKSAAMKKQRMTRRSLPGEQEQEVAGSKVFLEIDNRQCVQDSDHCFKNTDAAAALLASHAIQGTLSYPLVSVVSESLTPERTQLLYLLAVAVVIILFIILLGVIMAKRKRKHGSLWLPEGFTLRRDASNHKRREPVGQDAVGLKNLSVQVSEANLIGTGTSEHWVDDEGPQPKKVKAEDEALLSEEDDPIDRRPWTQQHLEAADIRRTPSLALTPPQAEQEVDVLDVNVRGPDGCTPLMLASLRGGSSDLSDEDEDAEDSSANIITDLVYQGASLQAQTDRTGEMALHLAARYSRADAAKRLLDAGADANAQDNMGRCPLHAAVAADAQGVFQILIRNRVTDLDARMNDGTTPLILAARLAVEGMVAELINCQADVNAVDDHGKSALHWAAAVNNVEATLLLLKNGANRDMQDNKEETPLFLAAREGSYEAAKILLDHFANRDITDHMDRLPRDVARDRMHHDIVRLLDEYNVTPSPPGTVLTSALSPVICGPNRSFLSLKHTPMGKKSRRPSAKSTMPTSLPNLAKEAKDAKGSRRKKSLSEKVQLSESSVTLSPVDSLESPHTYVSDTTSSPMITSPGILQASPNPMLATAAPPAPVHAQHALSFSNLHEMQPLAHGASTVLPSVSQLLSHHHIVSPGSGSAGSLSRLHPVPVPADWMNRMEVNETQYNEMFGMVLAPAEGTHPGIAPQSRPPEGKHITTPREPLPPIVTFQLIPKGSIAQPAGAPQPQSTCPPAVAGPLPTMYQIPEMARLPSVAFPTAMMPQQDGQVAQTILPAYHPFPASVGKYPTPPSQHSYASSNAAERTPSHSGHLQGEHPYLTPSPESPDQWSSSSPHSASDWSDVTTSPTPGGAGGGQRGPGTHMSEPPHNNMQVYA

SEQ ID NO: 69798 - protein, 23 aa, Homo sapiens
KRNFKARRSCLLVIMLLTRTETV

SEQ ID NO: 69799 - protein, 607 aa, Homo sapiens
TLLPPSLPLLLLLMLGMGCWAREVLVPEGPLYRVAGTAVSISCNVTGYEGPAQQNFEWFLYRPEAPDTALGIVSTKDTQFSYAVFKSRVVAGEVQVQRLQGDAVVLKIARLQAQDAGIYECHTPSTDTRYLGSYSGKVELRVLPDVLQVSAAPPGPRGRQAPTSPPRMTVHEGQELALGCLARTSTQKHTHLAVSFGRSVPEAPVGRSTLQEVVGIRSDLAVEAGAPYAERLAAGELRLGKEGTDRYRMVVGGAQAGDAGTYHCTAAEWIQDPDGSWAQIAEKRAVLAHVDVQTLSSQLAVTVGPGERRIGPGEPLELLCNVSGALPPAGRHAAYSVGWEMAPAGAPGPGRLVAQLDTEGVGSLGPGYEGRHIAMEKVASRTYRLRLEAARPGDAGTYRCLAKAYVRGSGTRLREAASARSRPLPVHVREEGVVLEAVAWLAGGTVYRGETASLLCNISVRGGPPGLRLAASWWVERPEDGELSSVPAQLVGGVGQDGVAELGVRPGGGPVSVELVGPRSHRLRLHSLGPEDEGVYHCAPSAWVQHADYSWYQAGSARSGPVTVYPYMHALDTLFVPLLVGTGVALVTGATVLGTITCCFMKRLRKR

SEQ ID NO: 69800 - protein, 387 aa, Homo sapiens
LGILMMANVFIYFIMEVSKSSSQEKNGKGEVIIPKEKFWKISTPPEAYWNREQEKLNRQYNPILSMLTNQTGEAGRLSNISHLNYCEPDLRVTSVVTGFNNLPDRFKDFLLYLRCRNYSLLIDQPDKCAKKPFLLLAIKSLTPHFARRQAIRESWGQESNAGNQTVVRVFLLGQTPPEDNHPDLSDMLKFESEKHQDILMWNYRDTFFNLSLKEVLFLRWVSTSCPDTEFVFKGDDDVFVNTHHILNYLNSLSKTKAKDLFIGDVIHNAGPHRDKKLKYYIPEVVYSGLYPPYAGGGGFLYSGHLALRLYHITDQVHLYPIDDVYTGMCLQKLGLVPEKHKGFRTFDIEEKNKNNICSYVDLMLVHSRKPQEMIDIWSQLQSAHLKC

SEQ ID NO: 69801 - protein, 717 aa, Homo sapiens
ILVGGGALATVLGLSQFAHYRRKQMNLAYVKAADCISEPVNREPPSREAQLLTLQNTSEFDILVIGGGATGSGCALDAVTRGLKTALVERDDFSSGTSSRSTKLIHGGVRYLQKAIMKLDIEQYRMVKEALHERANLLEIAPHLSAPLPIMLPVYKWWQLPYYWVGIKLYDLVAGSNCLKSSYVLSKSRALEHFPMLQKDKLVGAIVYYDGQHNDARMNLAIALTAARYGAATANYMEVVSLLKKTDPQTGKVRVSGARCKDVLTGQEFDVRAKCVINATGPFTDSVRKMDDKDAAAICQPSAGVHIVMPGYYSPESMGLLDPATSDGRVIFFLPWQKMTIAGTTDTPTDVTHHPIPSEEDINFILNEVRNYLSCDVEVRRGDVLAAWSGIRPLVTDPKSADTQSISRNHVVDISESGLITIAGGKWTTYRSMAEDTINAAVKTHNLKAGPSRTVGLFLQGGKDWSPTLYIRLVQDYGLESEVAQHLAATYGDKAFEVAKMASVTGKRWPIVGVRLVSEFPYIEAEVKYGIKEYACTAVDMISRRTRLAFLNVQAAEEALPRIVELMGRELNWDDYKKQEQLETARKFLYYEMGYKSRSEQLTDRSEISLLPSDIDRYKKRFHKFDADQKGFITIVDVQRVLESINVQMDENTLHEILNEVDLNKNGQVELNEFLQLMSAIQKGRVSGSRLAILMKTAEENLDRRVPIPVDRSCGGL

SEQ ID NO: 69802 - protein, 17 aa, Homo sapiens
LPLLLFLALTVARPRWR

SEQ ID NO: 69803 - protein, 32 aa, Homo sapiens
LLYMIGILFLLIQPCIRIIEQSRRKYMDGAHV

SEQ ID NO: 69804 - protein, 50 aa, Homo sapiens
RNRVKLVALQNLIGLLVSALKLAFLKQNCLFQGLLSQRHQNLDLLDYRPN

SEQ ID NO: 69805 - protein, 519 aa, Homo sapiens
LQPPTPPPLLLLLFPLLLFSRLCGALAGPIIVEPHVTAVWGKNVSLKCLIEVNETITQISWEKIHGKSSQTVAVHHPQYGFSVQGEYQGRVLFKNYSLNDATITLHNIGFSDSGKYICKAVTFPLGNAQSSTTVTVLVEPTVSLIKGPDSLIDGGNETVAAICIAATGKPVAHIDWEGDLGEMESTTTSFPNETATIISQYKLFPTRFARGRRITCVVKHPALEKDIRYSFILDIQYAPEVSVTGYDGNWFVGRKGVNLKCNADANPPPFKSVWSRLDGQWPDGLLASDNTLHFVHPLTFNYSGVYICKVTNSLGQRSDQKVIYISDPPTTTTLQPTIQWHPSTADIEDLATEPKKLPFPLSTLATIKDDTIATIIASVVGGALFIVLVSVLAGIFCYRRRRTFRGDYFAKNYIPPSDMQKESQIDVLQQDELDSYPDSVKKENKNPVNNLIRKDYLEEPEKTQWNNVENLNRFERPMDYYEDLKMGMKFVSDEHYDENEDDLVSHVDGSVISRREWYV

SEQ ID NO: 69806 - protein, 55 aa, Homo sapiens
MPVTWFLAWSAFFQVCLGPSPARGYSTLQARYAFFQPLGCGHCIQVGTSFPSLPF

SEQ ID NO: 69807 - protein, 283 aa, Homo sapiens
RQGTSPSKCPYLNFFQLLVLAGLSHFCSGVIHVTKEVKEVATLSCGHNVSVEELAQTRIYWQKEKKMVLTMMSGDMNIWPEYKNRTIFDITNNLSIVILALRPSDEGTYECVVLKYEKDAFKREHLAEVTLSVKADFPTPSISDFEIPTSNIRRIICSTSGGFPEPHLSWLENGEELNAINTTVSQDPETELYAVSSKLDFNMTTNHSFMCLIKYGHLRVNQTFNWNTTKQEHFPDNLLPSWAITLISVNGIFVICCLTYCFAPRCRERRRNERLRRESVRPV

SEQ ID NO: 69808 - protein, 541 aa, Homo sapiens
LRSKPALPPPLMLLLLGPLGPLSPGALPRPAQAQDVVDLDFFTQEPLHLVSPSFLSVTIDANLATDPRFLILLGSPKLRTLARGLSPAYLRFGGTKTDFLIFDPKKESTFEERSYWQSQVNQDICKYGSIPPDVEEKLRLEWPYQEQLLLREHYQKKFKNSTYSRSSVDVLYTFANCSGLDLIFGLNALLRTADLQWNSSNAQLLLDYCSSKGYNISWELGNEPNSFLKKADIFINGSQLGEDFIQLHKLLRKSTFKNAKLYGPDVGQPRRKTAKMLKSFLKAGGEVIDSVTWHHYYLNGRTATKEDFLNPDVLDIFISSVQKVFQVVESTRPGKKVWLGETSSAYGGGAPLLSDTFAAGFMWLDKLGLSARMGIEVVMRQVFFGAGNYHLVDENFDPLPDYWLSLLFKKLVGTKVLMASVQGSKRRKLRVYLHCTNTDNPRYKEGDLTLYAINLHNVTKYLRLPYPFSNKQVDKYLLRPLGPHGLLSKSVQLNGLTLKMVDDQTLPPLMEKPLRPGSSLGLPAFSYSFFVIRNAKVAACI

SEQ ID NO: 69809 - protein, 152 aa, Homo sapiens
IVICLMVIFLGTLVHKSSSQGQDRHMIRMRQLIDIVDQLKNYVNDLVPEFLPAPEDVETNCEWSAFSCFQKAQLKSANTGNNERIINVSIKKLKRKPPSTNAGRRQKHRLTCPSCDSYEKKPPKEFLERFKSLLQKMIHQHLSSRTHGSEDS

SEQ ID NO: 69810 - protein, 488 aa, Homo sapiens
LLAALTALLAAAAAGGDAPPGKIAVVGAGIGGSAVAHFLQQHFGPRVQIDVYEKGTVGGRLATISVNKQHYESGAASFHSLSLHMQDFVKLLGLRHRREVVGRSAIFGGEHFMLEETDWYLLNLFRLWWHYGISFLRLQMWVEEVMEKFMRIYKYQAHGYAFSGVEELLYSLGESTFVNMTQHSVAESLLQVGVTQRFIDDVVSAVLRASYGQSAAMPAFAGAMSLAGAQGSLWSVEGGNKLVCSGLLKLTKANVIHATVTSVTLHSTEGKALYQVAYENEVGNSSDFYDIVVIATPLHLDNSSSNLTFAGFHPPIDDVQGSFQPTVVSLVHGYLNSSYFGFPDPKLFPFANILTTDFPSFFCTLDNICPVNISASFRRKQPQEAAVWRVQSPKPLFRTQLKTLFRSYYSVQTAEWQAHPLYGSRPTLPRFALHDQLFYLNALEWAASSVEVMAVAAKNVALLAYNRWYQDLDKIDQKDLMHKVKTEL

SEQ ID NO: 69811 - protein, 543 aa, Homo sapiens
LLALLLATLLAAMLALLTQVALVVQVAEAARAPSVSAKPGPALWPLPLLVKMTPNLLHLAPENFYISHSPNSTAGPSCTLLEEAFRRYHGYIFGFYKWHHEPAEFQAKTQVQQLLVSITLQSECDAFPNISSDESYTLLVKEPVAVLKANRVWGALRGLETFSQLVYQDSYGTFTINESTIIDSPRFSHRGILIDTSRHYLPVKIILKTLDAMAFNKFNVLHWHIVDDQSFPYQSITFPELSNKGSYSLSHVYTPNDVRMVIEYARLRGIRVLPEFDTPGHTLSWGKGQKDLLTPCYSRQNKLDSFGPINPTLNTTYSFLTTFFKEISEVFPDQFIHLGGDEVEFKCWESNPKIQDFMRQKGFGTDFKKLESFYIQKVLDIIATINKGSIVWQEVFDDKAKLAPGTIVEVWKDSAYPEELSRVTASGFPVILSAPWYLDLISYGQDWRKYYKVEPLDFGGTQKQKQLFIGGEACLWGEYVDATNLTPRLWPRASAVGERLWSSKDVRDMDDAYDRLTRHRCRMVERGIAAQPLYAGYCNHENM

SEQ ID NO: 69812 - protein, 11 aa, Homo sapiens
VLGTVCLIVVA

SEQ ID NO: 69813 - protein, 38 aa, Homo sapiens
ICVASRELMGIVTWLLSSFMSSAEESVSARTTILLSSG

SEQ ID NO: 69814 - protein, 40 aa, Homo sapiens
IYIPLIGFLLSIPRLPSMVEASDFEINGLDFMVRPSTSVR

SEQ ID NO: 69815 - protein, 18 aa, Homo sapiens
ILYFGTVPWMVLFIKRET

SEQ ID NO: 69816 - protein, 146 aa, Homo sapiens
KKWIHCFEGVTAIIFCVALSDYDLVLAEDEEMNRMHESMKLFDSICNNKWFTDTSIILFLNKKDLFEEKIKKSPLTICYPEYAGSNTYEEAAAYIQCQFEDLNKRKDTKEIYTHFTCATDTKNVQFVFDAVTDVIIKNNLKDCGLF

SEQ ID NO: 69817 - protein, 36 aa, Homo sapiens
KPLFSVTFLILENWQLLSFFLLESINSHIFLALPED

SEQ ID NO: 69818 - protein, 31 aa, Homo sapiens
LGLALLLGGALLFWVLLHRRWSEAVAEVGPD

SEQ ID NO: 69819 - protein, 12 aa, Homo sapiens
LQLLILTMLNLG

SEQ ID NO: 69820 - protein, 27 aa, Homo sapiens
LSPLKSQLQLWSCTTMLLVLVLEALKL

SEQ ID NO: 69821 - protein, 412 aa, Homo sapiens
LAAVAIFFVITFLIFLCSSCDREKKPRQHSGDHENLMNVPSDKEMFSRSVTSLATDAPASSEQNGALTNGDILSEDSTLTCMQHYEEVQTSASDLLDSQDSTGKPKCHQSRELPRIPPESAVDTMLTARSVDGDQGLGMEGPYEVLKDSSSQENMVEDCLYETVKEIKEVAAAAHLEKGHSGKAKSTSASKELPGPQTEGKAEFAEYASVDRNKKCRQSVNVESILGNSCDPEEEAPPPVPVKLLDENENLQEKEGGEAEESATDTTSETNKRFSSLSYKSREEDPTLTEEEISAMYSSVNKPGQLVNKSGQSLTVPESTYTSIQGDPQRSPSSCNDLYATVKDFEKTPNSTLPPAGRPSEEPEPDYEAIQTLNREEEKATLGTNGHHGLVPKENDYESISDLQQGRDITRL

SEQ ID NO: 69822 - protein, 10 aa, Homo sapiens
LGIFFVKFCL

SEQ ID NO: 69823 - protein, 187 aa, Homo sapiens
LCLVFTVATIMVLVVQRTDSIPNSPDNVPLKGGNCSEDLLCILKRAPFKKSWAYLQVAKHLNKTKLSWNKDGILHGVRYQDGNLVIQFPGLYFIICQLQFLVQCPNNSVDLKLELLINKHIKKQALVTVCESGMQTKHVYQNLSQFLLDYLQVNTTISVNVDTFQYIDTSTFPLENVLSIFLYSNSD

SEQ ID NO: 69824 - protein, 374 aa, Homo sapiens
LLVAVCALHLGVTLVYYLAGRDLSRLPQLVGVSTPLQGGSNSAAAIGQSSGELRTGGARPPPPLGASSQPRPGGDSSPVVDSGPGPASNLTSVPVPHTTALSLPACPEESPLLVGPMLIEFNMPVDLELVAKQNPNVKMGGRYAPRDCVSPHKVAIIIPFRNRQEHLKYWLYYLHPVLQRQQLDYGIYVINQAGDTIFNRAKLLNVGFQEALKDYDYTCFVFSDVDLIPMNDHNAYRCFSQPRHISVAMDKFGFSLPYVQYFGGVSALSKQQFLTINGFPNNYWGWGGEDDDIFNRLVFRGMSISRPNAVVGRCRMIRHSRDKKNEPNPQRFDRIAHTKETMLSDGLNSLTYQVLDVQRYPLYTQITVDIGTPS

SEQ ID NO: 69825 - protein, 319 aa, Homo sapiens
LGAAALALGGALGLYHTARWHLRAQDLHAERSAAQLSLSSRLQLTLYQYKTCPFCSKVRAFLDFHALPYQVVEVNPVRRAEIKFSSYRKVPILVAQEGESSQQLNDSSVIISALKTYLVSGQPLEEIITYYPAMKAVNEQGKEVTEFGNKYWLMLNEKEAQQVYGGKEARTEEMKWRQWADDWLVHLISPNVYRTPTEALASFDYIVREGKFGAVEGAVAKYMGAAAMYLISKRLKSRHRLQDNVREDLYEAADKWVAAVGKDRPFMGGQKPNLADLAVYGVLRVMEGLDAFDDLMQHTHIQPWYLRVERAITEASPAH

SEQ ID NO: 69826 - protein, 23 aa, Homo sapiens
MPSGSILKSSWLWIGGFLVSTDL

SEQ ID NO: 69827 - protein, 46 aa, Homo sapiens [sequence omitted]

SEQ ID NO: 69828 - protein, 14 aa, Homo sapiens
IKLLNLYLPLALNF

SEQ ID NO: 69829 - protein, 228 aa, Homo sapiens
ITFPVFGFFFCIIWSLVFHFEYTVATDCGVPNYLPSVSSAIGGEVPQRYVWRFCIGLHSAPRFLVAFAYWNHYLSCTSPCSCYRPLCRLNFGLNVVENLALLVLTYVSSSEDFTIHENAFIVFIASSLGHMLLTCILWRLTKKHTVSQEDRKSYSWKQRLFIINFISFFSALAVYFRHNMYCEAGVYTIFAILEYTVVLTNMAFHMTAWWDFGNKELLITSQPEEKRF

SEQ ID NO: 69830 - protein, 11 aa, Homo sapiens
IIILSLAIVCP

SEQ ID NO: 69831 - protein, 419 aa, Homo sapiens
RWRTILLQYCFLLITCLLTALEAVPIDIDKTKVQNIHPVESAKIEPPDTGLYYDEYLKQVIDVLETDKHFREKLQKADIEEIKSGRLSKELDLVSHHVRTKLDELKRQEVGRLRMLIKAKLDSLQDIGMDHQALLKQFDHLNHLNPDKFESTDLDMLIKAATSDLEHYDKTRHEEFKKYEMMKEHERREYLKTLNEEKRKEEESKFEEMKKKHENHPKVNHPGSKDQLKEVWEETDGLDPNDFDPKTFFKLHDVNSDGFLDEQELEALFTKELEKVYDPKNEEDDMVEMEEERLRMREHVMNEVDTNKDRLVTLEEFLKATEKKEFLEPDSWETLDQQQFFTEEELKEYENIIALQENELKKKADELQKQKEELQRQHDQLEAQKLEYHQVIQQMEQKKLQQGIPPSGPAGELKFEPHI

SEQ ID NO: 69832 - protein, 79 aa, Homo sapiens
IKQKPTTGLLAITLALHLCDLVHIAGFGYPDAYNKKQTIHYYEQITLKSMAGSGHNVSQEALAIKRMLEMGAIKNLTSF

SEQ ID NO: 69833 - protein, 45 aa, Homo sapiens
VLLLGVTLFITVLVLFALQAYESYKKKDYTQVDYLINGMYADSEM

SEQ ID NO: 69834 - protein, 19 aa, Homo sapiens
LLLLLLSLSLLQATDFMSL

SEQ ID NO: 69835 - protein, 52 aa, Homo sapiens
LMIIIVIVVVLFQHYRKKRWAERAHKVVEIKSKEEERLNQEKKVSVYLEDTD

SEQ ID NO: 69836 - protein, 17 aa, Homo sapiens
IATLLLDLLVVKLFYTV

SEQ ID NO: 69837 - protein, 281 aa, Homo sapiens
LAACGLAGGSAAVLFSAVAVGKPRAGGDAEPRPAEPPAWAGGARPGPGVWDPNWDRREPLSLINVRKRNVESGEEELASKLDHYKAKATRHIFLIRHSQYHVDGSLEKDRTLTPLGREQAELTGLRLASLGLKFNKIVHSSMTRAIETTDIISRHLPGVCKVSTDLLREGAPIEPDPPVSHWKPEAVQYYEDGARIEAAFRNYIHRADARQEEDSYEIFICHANVIRYIVCRALQFPPEGWLRLSLNNGSITHLVIRPNGRVALRTLGDTGFMPPDKITRS

SEQ ID NO: 69838 - protein, 234 aa, Homo sapiens
LLLLLLLLGLLAPGAQGARGRGGAEKNSYRRTVNTFSQSVSSLFGEDNVRAAQKFLARLTERFVLGVDMFVETLWKVWTELLDVLGLDVSNLSQYFSPASVSSSPARALLLVGVVLLAYWFLSLTLGFTFSVLHVVFGRFFWIVRVVLFSMSCVYILHKYEGEPENAVLPLCFVVAVYFMTGPMGFYWRSSPSGPSNPSNPSVEEKLEHLEKQVRLLNIRLNRVLESLDRSKDK

SEQ ID NO: 69839 - protein, 73 aa, Homo sapiens [sequence omitted]

SEQ ID NO: 69840 - protein, 137 aa, Homo sapiens
ICLILMASVVTIVVIPSRHCGHCPEEWITYSNSCYYIGKERRTWEESLLACTSKNSSLLSIDNEEEMKFLSIISPSSWIGVFRNSSHHPWVTMNGLAFKHEIKDSDNAELNCAVLQVNRLKSAQCGSSIIYHCKHKL

SEQ ID NO: 69841 - protein, 163 aa, Homo sapiens
IICIVLMATVLKTIVLIPFLEQNNFSPNTRTQKARHCGHCPEEWITYSNSCYYIGKERRTWEESLQACASKNSSSLLCIDNEEEMKFLASILPSSWIGVFRNSSHHPWVTINGLAFKHEIKDSDHAERNCAMLHVRGLISDQCGSSRIIRRGFIMLTRLVLNS

SEQ ID NO: 69842 - protein, 180 aa, Homo sapiens
IICIVLMATVLKTIVLIPFLEQNNSSPNARTQKARHCGHCPEEWITYSNSCYYIGKERRTWEESLQACASKNSSSLLCIDNEEEMKFLASILPSSWIGVFRNSSHHPWVTINGLAFKHEIKDSDHAERNCAMLHVRGLISDQCGSSRIIVSISFRIKALELAVHQIKFYICSNRNDIMIA

SEQ ID NO: 69843 - protein, 99 aa, Homo sapiens
VVFSLFLICAMAGDVVYADIKTVRTSPLELAFPLQRSVSFNFSTVHKSCPAKDWKVHKGKCYWIAETKKSWNKSQNDCAINNSYLMVIQDITAMVRFNI

SEQ ID NO: 69844 - protein, 32 aa, Homo sapiens
LSVTTLSLLLAPVLWRAAITRCVPRPERRSSL

SEQ ID NO: 69845 - protein, 23 aa, Homo sapiens
LFAVFSCVLMLQCHISFHLKLKF

SEQ ID NO: 69846 - protein, 6 aa, Homo sapiens
LIALIF

SEQ ID NO: 69847 - protein, 67 aa, Homo sapiens
ISRVRLVNVWHFATLLLLSGDSSSTRRDRRRKAAEPGEERNMGTRAKSRRRPSRPLFLYSGSGYIRE

SEQ ID NO: 69848 - protein, 80 aa, Homo sapiens
VHSTRVLNLRRFLRGAAWMLLSPTRCISCCHQESSLASQGLRKYHQSDSTVLCPLRGRRKRMPCRTAHSVPLCSRTPSIM

SEQ ID NO: 69849 - protein, 1345 aa, Homo sapiens
IPSIVITVIFLFFWLFMKETLYDEVLAKQKREQKLIPTKTDKKKAEKKKNKKKEIQNGNLHESDSESVPRDFKLSDALAVEDDQVAPVPLNVVETSSSVRERKKKEKKQKPVLEEQVIKESDASKIPGKKVEPVPVTKQPTPPSEAAASKKKPGQKKSKNGSDDQDKKVETLMVPSKRQEALPLHQETKQESGSGKKKASSKKQKTENVFVDEPLIHATTYIPLMDNADSSPVVDKREVIDLLKPDQVEGIQKSGTKKLKTETDKENAEVKFKDFLLSLKTMMFSEDEALCVVDLLKEKSGVIQDALKKSSKGELTTLIHQLQEKDKLLAAVKEDAAATKDRCKQLTQEMMTEKERSNVVITRMKDRIGTLEKEHNVFQNKIHVSYQETQQMQMKFQQVREQMEAEIAHLKQENGILRDAVSNTTNQLESKQSAELNKLRQDYARLVNELTEKTGKLQQEEVQKKNAEQAATQLKVQLQEAERRWEEVQSYIRKRTAEHEAAQQDLQSKFVAKENEVQSLHSKLTDTLVSKQQLEQRLMQLMESEQKRVNKEESLQMQVQDILEQNEALKAQIQQFHSQIAAQTSASVLAEELHKVIAEKDKQIKQTEDSLASERDRLTSKEEELKDIQNMNFLLKAEVQKLQALANEQAAAAHELEKMQQSVYVKDDKIRLLEEQLQHEISNKMEEFKILNDQNKALKSEVQKLQTLVSEQPNKDVVEQMEKCIQEKDEKLKTVEELLETGLIQVATKEEELNAIRTENSSLTKEVQDLKAKQNDQVSFASLVEELKKVIHEKDGKIKSVEELLEAELLKVANKEKTVQDLKQEIKALKEEIGNVQLEKAQQLSITSKVQELQNLLKGKEEQMNTMKAVLEEKEKDLANTGKWLQDLQEENESLKAHVQEVAQHNLKEASSASQFEELEIVLKEKENELKRLEAMLKERESDLSSKTQLLQDVQDENKLFKSQIEQLKQQNYQQASSFPPHEELLKVISEREKEISGLWNELDSLKDAVEHQRKKNNDLREKNWEAMEALASTEKMLQDKVNKTSKERQQQVEAVELEAKEVLKKLFPKVSVPSNLSYGEWLHGFEKKAKECMAGTSGSEEVKVLEHKLKEADEMHTLLQLECEKYKSVLAETEGILQKLQRSVEQEENKWKVKVDESHKTIKQMQSSFTSSEQELERLRSENKDIENLRREREHLEMELEKAEMERSTYVTEVRELKDLLTELQKKLDDSYSEAVRQNEELNLLKAQLNETLTKLRTEQNERQKVAGDLHKAQQSLELIQSKIVKAAGDTTVIENSDVSPETESSEKETMSVSLNQTVTQLQQLLQAVNQQLTKEKEHYQVLE

SEQ ID NO: 69850 - protein, 796 aa, Homo sapiens
RRMRVRIGLTLLLCAVLLSLASASSDEEGSQDESLDSKTTLTSDESVKDHTTAGRVVAGQIFLDSEESELESSIQEEEDSLKSQEGESVTEDISFLESPNPENKDYEEPKKVRKPALTAIEGTAHGEPCHFPFLFLDKEYDECTSDGREDGRLWCATTYDYKADEKWGFCETEEEAAKRRQMQEAEMMYQTGMKILNGSNKKSQKREAYRYLQKAASMNHTKALERVSYALLFGDYLPQNIQAAREMFEKLTEEGSPKGQTALGFLYASGLGVNSSQAKALVYYTFGALGGNLIAHMVLGYRYWAGIGVLQSCESALTHYRLVANHVASDISLTGGSVVQRIRLPDEVENPGMNSGMLEEDLIQYYQFLAEKGDVQAQVGLGQLHLHGGRGVEQNHQRAFDYFNLAANAGNSHAMAFLGKMYSEGSDIVPQSNETALHYFKKAADMGNPVGQSGLGMAYLYGRGVQVNYDLALKYFQKAAEQGWVDGQLQLGSMYYNGIGVKRDYKQALKYFNLASQGGHILAFYNLAQMHASGTGVMRSCHTAVELFKNVCERGRWSERLMTAYNSYKDGDYNAAVIQYLLLAEQGYEVAQSNAAFILDQREASIVGENETYPRALLHWNRAASQGYTVARIKLGDYHFYGFGTDVDYETAFIHYRLASEQQHSAQAMFNLGYMHEKGLGIKQDIHLAKRFYDMAAEASPDAQVPVFLALCKLGVVYFLQYIRETNIRDMFTQLDMDQLLGPEWDLYLMTIIALLLGTVIAYRQRQHQDMPAPRPPGPRPAPPQQEGPPEQQPPQ

SEQ ID NO: 69851 - protein, 35 aa, Homo sapiens
LNHRIGLNWSLFMLSGIPGVSLKSCLPIPENIMAT

SEQ ID NO: 69852 - protein, 134 aa, Homo sapiens
RGAQVPWHLPMGWLCSGLLFPVSCLVLLQVASSGNMKVLQEPTCVSDYMSISTCEWKMNGPTNCSTELRLLYQLVFLLSEAHTCIPENNGGAGCVCHLLMDDVVSADNYTLDLWAGQQLLWKGSFKPSEHVQNL

SEQ ID NO: 69853 - protein, 20 aa, Homo sapiens
LLLLLNCLLQTLLVLLVLLQ

SEQ ID NO: 69854 - protein, 18 aa, Homo sapiens
IRPAVGAGRASVLVLSWL

SEQ ID NO: 69855 - protein, 14 aa, Homo sapiens
LASFPLSVLVLLTS

SEQ ID NO: 69856 - protein, 10 aa, Homo sapiens
LLLLFKFLVI

SEQ ID NO: 69857 - protein, 14 aa, Homo sapiens
LNLHKFACFCLLLS

SEQ ID NO: 69858 - protein, 746 aa, Homo sapiens
VPAVFTLRMQPRWAQGATMWLGVLLTLLLCSSLEGQENSFTINSVDMKSLPDWTVQNGKNLTLQCFADVSTTSHVKPQHQMLFYKDDVLFYNISSMKSTESYFIPEVRIYDSGTYKCTVIVNNKEKTTAEYQVLVEGVPSPRVTLDKKEAIQGGIVRVNCSVPEEKAPIHFTIEKLELNEKMVKLKREKNSRDQNFVILEFPVEEQDRVLSFRCQARIISGIHMQTSESTKSELVTVTESFSTPKFHISPTGMIMEGAQLHIKCTIQVTHLAQEFPEIIIQKDKAIVAHNRHGNKAVYSVMAMVEHSGNYTCKVESSRISKVSSIVVNITELFSKPELESSFTHLDQGERLNLSCSIPGAPPANFTIQKEDTIVSQTQDFTKIASKSDSGTYICTAGIDKVVKKSNTVQIVVCEMLSQPRISYDAQFEVIKGQTIEVRCESISGTLPISYQLLKTSKVLENSTKNSNDPAVFKDNPTEDVEYQCVADNCHSHAKMLSEVLRVKVIAPVDEVQISILSSKVVESGEDIVLQCAVNEGSGPITYKFYREKEGKPFYQMTSNATQAFWTKQKASKEQEGEYYCTAFNRANHASSVPRSKILTVRVILAPWKKGLIAVVIIGVIIALLIIAAKCYFLRKAKAKQMPVEMSRPAVPLLNSNNEKMSDPNMEANSHYGHNDDVRNHAMKPINDNKEPLNSDVQYTEVQVSSAESHKDLGKKDTETVYSEVRKAVPDAVESRYSRTEGSLDGT

SEQ ID NO: 69859 - protein, 47 aa, Homo sapiens
IAIFLRISVYINIMNDKFSSMCMSGFCTCISNLSVCMKCMFIEIQDI

SEQ ID NO: 69860 - protein, 1283 aa, Homo sapiens
LRGHSMTARGLALGLLLLLLCPAQVFSQSCVWYGECGIAYGDKRYNCEYSGPPKPLPKDGYDLVQELCPGFFFGNVSLCCDVRQLQTLKDNLQLPLQFLSRCPSCFYNLLNLFCELTCSPRQSQFLNVTATEDYVDPVTNQTKTNVKELQYYVGQSFANAMYNACRDVEAPSSNDKALGLLCGKDADACNATNWIEYMFNKDNGQAPFTITPVFSDFPVHGMEPMNNATKGCDESVDEVTAPCSCQDCSIVCGPKPQPPPPPAPWTILGLDAMYVIMWITYMAFLLVFFGAFFAVWCYRKRYFVSEYTPIDSNIAFSVNASDKGEASCCDPVSAAFEGCLRRLFTRWGSFCVRNPGCVIFFSLVFITACSSGLVFVRVTTNPVDLWSAPSSQARLEKEYFDQHFGPFFRTEQLIIRAPLTDKHIYQPYPSGADVPFGPPLDIQILHQVLDLQIAIENITASYDNETVTLQDICLAPLSPYNTNCTILSVLNYFQNSHSVLDHKKGDDFFVYADYHTHFLYCVRAPASLNDTSLLHDPCLGTFGGPVFPWLVLGGYDDQNYNNATALVITFPVNNYYNDTEKLQRAQAWEKEFINFVKNYKNPNLTISFTAERSIEDELNRESDSDVFTVVISYAIMFLYISLALGHMKSCRRLLVDSKVSLGIAGILIVLSSVACSLGVFSYIGLPLTLIVIEVIPFLVLAVGVDNIFILVQAYQRDERLQGETLDQQLGRVLGEVAPSMFLSSFSETVAFFLGALSVMPAVHTFSLFAGLAVFIDFLLQITCFVSLLGLDIKRQEKNRLDIFCCVRGAEDGTSVQASESCLFRFFKNSYSPLLLKDWMRPIVIAIFVGVLSFSIAVLNKVDIGLDQSLSMPDDSYMVDYFKSISQYLHAGPPVYFVLEEGHDYTSSKGQNMVCGGMGCNNDSLVQQIFNAAQLDNYTRIGFAPSSWIDDYFDWVKPQSSCCRVDNITDQFCNASVVDPACVRCRPLTPEGKQRPQGGDFMRFLPMFLSDNPNPKCGKGGHAAYSSAVNILLGHGTRVGATYFMTYHTVLQTSADFIDALKKARLIASNVTETMGINGSAYRVFPYSVFYVFYEQYLTIIDDTIFNLGVSLGAIFLVTMVLLGCELWSAVIMCATIAMVLVNMFGVMWLWGISLNAVSLVNLVMSCGISVEFCSHITRAFTVSMKGSRVERAEEALAHMGSSVFSGITLTKFGGIVVLAFAKSQIFQIFYFRMYLAMVLLGATHGLIFLPVLLSYIGPSVNKAKSCATEERYKGTERERLLNF

SEQ ID NO: 69861 - protein, 9 aa, Homo sapiens
KMIQIILVL

SEQ ID NO: 69862 - protein, 50 aa, Homo sapiens
TMIGDILLFGTLLMNAGAVLNFKLKKKDTQGFGEESREPSTGCSALESQR

SEQ ID NO: 69863 - protein, 798 aa, Homo sapiens
KKLISMDSWFILVLLGSGLICVSANNATTVAPSVGITRLINSSTAEPVKEEAKTSNPTSSLTSLSVAPTFSPNITLGPTYLTTVNSSDSDNGTTRTASTNSIGITISPNGTWLPDNQFTDARTEPWEGNSSTAATTPETFPPSDETPIIAVMVALSSLLVIVFIIIVLYMLRFKKYKQAGSHSNSFRLSNGRTEDVEPQSVPLLARSPSTNRKYPPLPVDKLEEEINRRMADDNKLFREEFNALPACPIQATCEAASKEENKEKNRYVNILPYDHSRVHLTPVEGVPDSDYINASFINGYQEKNKFIAAQGPKEETVNDFWRMIWEQNTATIVMVTNLKERKECKCAQYWPDQGCWTYGNIRVSVEDVTVLVDYTVRKFCIQQVGDMTNRKPQRLITQFHFTSWPDFGVPFTPIGMLKFLKKVKACNPQYAGAIVVHCSAGVGRTGTFVVIDAMLDMMHTERKVDVYGFVSRIRAQRCQMVQTDMQYVFIYQALLEHYLYGDTELEVTSLETHLQKIYNKIPGTSNNGLEEEFKKLTSIKIQNDKMRTGNLPANMKKNRVLQIIPYEFNRVIIPVKRGEENTDYVNASFIDGYRQKDSYIASQGPLLHTIEDFWRMIWEWKSCSIVMLTELEERGQEKCAQYWPSDGLVSYGDITVELKKEEECESYTVRDLLVTNTRENKSRQIRQFHFHGWPEVGIPSDGKGMISIIAAVQKQQQQSGNHPITVHCSAGAGRTGTFCALSTVLERVKAEGILDVFQTVKSLRLQRPHMVQTLEQYEFCYKVVQEYIDAFSDYANFK

SEQ ID NO: 69864 - protein, 83 aa, Homo sapiens
TAMDWLPWSLLLFSLMCETSAFYVPGVAPINFHQNDPVEIKAVKLTSSRTQLPYEYYSLPFCQPSKITYKAENLGRRKERTGS

SEQ ID NO: 69865 - protein, 377 aa, Homo sapiens
VSFLLLLLPLPGMPAGSWDPAGYLLYCPCMGRFGNQADHFLGSLAFAKLLNRTLAVPPWIEYQHHKPPFTNLHVSYQKYFKLEPLQAYHRVISLEDFMEKLAPTHWPPEKRVAYCFEVAAQRSPDKKTCPMKEGNPFGPFWDQFHVSFNKSELFTGISFSASYREQWSQRFSPKEHPVLALPGAPAQFPVLEEHRPLQKYMVWSDEMVKTGEAQIHAHLVRPYVGIHLRIGSDWKNACAMLKDGTAGSHFMASPQCVGYSRSTAAPLTMTMCLPDLKEIQRAVKLWVRSLDAQSVYVATDSESYVPELQQLFKGKVKVVSLKPEVAQVDLYILGQADHFIGNCVSSFTAFVKRERDLQGRPSSFFGMDRPPKLRDEF

SEQ ID NO: 69866 - protein, 46 aa, Homo sapiens
KLEERFRFNRRDLIGFEFTVLVALELALYLPENQVLPHYRRLTQQF

SEQ ID NO: 69867 - protein, 323 aa, Homo sapiens
IFRSLNLVLMVYISLVFGISYDSPDYTDESCTFKISLRNFRSILSWELKNHSIVPTHYTLLYTIMSKPEDLKVVKNCANTTRSFCDLTDEWRSTHEAYVTVLEGFSGNTTLFSCSHNFWLAIDMSFEPPEFEIVGFTNHINVMVKFPSIVEEELQFDLSLVIEEQSEGIVKKHKPEIKGNMSGNFTYIIDKLIPNTNYCVSVYLEHSDEQAVIKSPLKCTLLPPGQESESAESAKIGGIITVFLIALVLTSTIVTLKWIGYICLRNSLPKVLRQGLAKGWNAVAIHRCSHNALQSETPELKQSSCLSFPSSWDYKRASLCPSD

SEQ ID NO: 69868 - protein, 507 aa, Homo sapiens
IFRSLNLVLMVYISLVFGISYDSPDYTDESCTFKISLRNFRSILSWELKNHSIVPTHYTLLYTIMSKPEDLKVVKNCANTTRSFCDLTDEWRSTHEAYVTVLEGFSGNTTLFSCSHNFWLAIDMSFEPPEFEIVGFTNHINVMVKFPSIVEEELQFDLSLVIEEQSEGIVKKHKPEIKGNMSGNFTYIIDKLIPNTNYCVSVYLEHSDEQAVIKSPLKCTLLPPGQESESAESAKIGGIITVFLIALVLTSTIVTLKWIGYICLRNSLPKVLNFHNFLAWPFPNLPPLEAMDMVEVIYINRKKKVWDYNYDDESDSDTEAAPRTSGGGYTMHGLTVRPLGQASATSTESQLIDPESEEEPDLPEVDVELPTMPKDSPQQLELLSGPCERRKSPLQDPFPEEDYSSTEGSGGRITFNVDLNSVFLRVLDDEDSDDLEAPLMLSSHLEEMVDPEDPDNVQSNHLLASGEGTQPTFPSPSSEGLWSEDAPSDQSDTSESDVDLGDGYIMR

SEQ ID NO: 69869 - protein, 9 aa, Homo sapiens
MFVAFYLAA

SEQ ID NO: 69870 - protein, 149 aa, Homo sapiens
VLKGLTCLLLLFAQKRGNVKHLVLFLHEAVLVQYVDTLKLAVPSLIYTLQNNLQYVAISNLPAATFQPSPRCSQSHSLCLCLRLRALRSPAASRAATTTAAVFPPWRPHHGALSAKVAHQGEGFLAAGIEDIGLASFSLLALGPAGTKL

SEQ ID NO: 69871 - protein, 536 aa, Homo sapiens
MVVILGASNILWIMFAASQAFKIETTPESRYLAQIGDSVSLTCSTTGCESPFFSWRTQIDSPLNGKVTNEGTTSTLTMNPVSFGNEHSYLCTATCESRKLEKGIQVEIYSFPKDPEIHLSGPLEAGKPITVKCSVADVYPFDRLEIDLLKGDHLMKSQEFLEDADRKSLETKSLEVTFTPVIEDIGKVLVCRAKLHIDEMDSVPTVRQAVKELQVYISPKNTVISVNPSTKLQEGGSVTMTCSSEGLPAPEIFWSKKLDNGNLQHLSGNATLTLIAMRMEDSGIYVCEGVNLIGKNRKEVELIVQVAPRDTTVLVSPSSILEEGSSVNMTCLSQGFPAPKILWSRQLPNGELQPLSENATLTLISTKMEDSGVYLCEGINQAGRSRKEVELIIQVTPKDIKLTAFPSESVKEGDTVIISCTCGNVPETWIILKKKAETGDTVLKSIDGAYTIRKAQLKDAGVYECESKNKVGSQLRSLTLDVQGRENNKDYFSPELLVLYFASSLIIPAIGMIIYFARKANMKGSYSLVEAQKSKV

SEQ ID NO: 69872 - protein, 327 aa, Homo sapiens [sequence omitted]

SEQ ID NO: 69873 - protein, 96 aa, Homo sapiens
MFPLLLLLLPFLLYMAAPQIRKMLSSGVCTSTVQLPGKVVVVTGANTGIGKETAKELAQRGKFTSFQFPPITAVLPLTVMMIHSHCFFPVLEFKNT

SEQ ID NO: 69874 - protein, 304 aa, Homo sapiens
MPCLEAVALILLILLVPDPPRGAAETQGEGAVGGFRSSWCEDVRYLGKNWSFVWSTLGVTAMAFVTGALGFWAPKFLLEARVVHGLQPPCFQEPCSNPDSLIFGALTIMTGVIGVILGAEAARRYKKVIPGAEPLICASSLLATAPCLYLALVLAPTTLLASYVFLGLGELLLSCNWAVVADILLSVVVPRCRGTAEALQITVGHILGDAGSPYLTGLISSVLRARRPDSYLQRFRSLQQSFLCCAFVIALGGGCFLLTALYLERDETRAWQPVTGTPDSNDVDSNDLERQGLLSGAGASTEEP

SEQ ID NO: 69875 - protein, 94 aa, Homo sapiens
MAAGAALALALWLLMPPVEVGGAGPPPIQDGEFTFLLPAGRKQCFYQSAPANASLETEYQVIGGAGLDVDFTLESPQGVLLGGANGGRGLQAVL

SEQ ID NO: 69876 - protein, 132 aa, Homo sapiens
MTVLAPAWSPTTYLLLLLLLSSGLSGTQDCSFQHSPISSDFAVKIRELSDYLLQDYPVTVASNLQDEELCGGLWRLVLAQRWMERLKTVAGSKMQGLLERVNTEIHFVTKCAFQVSPQLRGQVRGGRCLPTN

SEQ ID NO: 69877 - protein, 359 aa, Homo sapiens
MVFVHLYLGNVLALLLFVHYSNGDESSDPGPQHRAQGPGPEPTLGPLTRLEGIKVGHERKVQLVTDRDHFIRTLSLKPLLFEIPGFLTDEECRLIIHLAQMKGLQRSQILPTEEYEEAMSTMQVSQLDLFRLLDQNRDGHLQLREVLAQTRLGNGWWMTPESIQEMYAAIKADPDGDGVLSLQEFSNMDLRDFHKYMRSHKAESSELVRNSHHTWLYQGEGAHHIMRAIRQRVLRLTRLSPEIVELSEPLQVVRYGEGGHYHAHVDSGPVYPETICSHTKLVANESVPFETSCRQVSPNWGLPSILRPGTPMTQAQPCTVGVPLGMGPGDHWVIPVSDALTSPHKLFTQWLERGGYWSS

SEQ ID NO: 69878 - protein, 127 aa, Homo sapiens
MVFVHLYLGNVLALLLFVHYSNGDESSDPGPQHRAQGPGPEPTLGPLTRLEGIKVRTSLPRRAPGPARLSPRGPALSPGPHAAPGAALRRSRALPLTRLLSLSGPGRLGPSWAARSGAPAARCAPFP

SEQ ID NO: 69879 - protein, 24 aa, Homo sapiens
MDNLKKKRILVSWLLLLELSLLPR

SEQ ID NO: 69880 - protein, 243 aa, Homo sapiens
MAPRTLFLLLSGALTLTETWAGSHSMRYFSAAVSRPGRGEPRFIAMGYVDDTQFVRFDSDSACPRMEPRAPWVEQEGPEYWEEETRNTKAHAQTDRMNLQTLRGYYNQSEANPPKTHVTHHPVFDYEATLRCWALGFYPAEIILTWQRDGEDQTQDVELVETRPAGDGTFQKWAAVVVPSGEEQRYTCHVQHEGLPEPLMLRWKQSSLPTIPIMGIVAGLVVLAAVVTGAAVAAVLWRKKSSD

SEQ ID NO: 69881 - protein, 68 aa, Homo sapiens
VLSGALIILVASPLRALRARGKVQGCETLRPGEKAPLSREQHLQSPKECRTSASDVDADNNCLGTEVA

SEQ ID NO: 69882 - protein, 105 aa, Homo sapiens
ICFFSIWSILGLSGFHTYLVASNLTTNEDIKGSWSSKRGGEASVNPYSHKSIITNCCAVLCGPLPPSLIDRRGFVQSDTVLPSPIRSDEPACRAKPDASMVGGHP

SEQ ID NO: 69883 - protein, 15 aa, Homo sapiens
RELRSRFLLVLLWCE

SEQ ID NO: 69884 - protein, 35 aa, Homo sapiens
VVFVFSLLDCCALIFLSVYFVSLPEAGERLAGGHG

SEQ ID NO: 69885 - protein, 310 aa, Homo sapiens
LLLLWLSLPVRLPSFVVSQRCAGLLLAALRIQGVGCQVQVWKALLQEMPLTALLRNLGKMTANSVLEPGNSEVSLVCEKLCNEKLLKKARIHPFHILIALETYKTGHGLRGKLKWRPDEEILKALDAAFYKTFKTVEPTGKRFLLAVDVSASMNQRVLGSILNASTVAAAMCMVVTRTEKDSYVVAFSDEMVPCPVTTDMTLQQVLMAMSQIPAGGTDCSLPMIWAQKTNTPADVFIVFTDNETFAGGVHPAIALREYRKKMDIPAKLIVCGMTSNGFTIADPDDRGMLDMCGFDTGALDVIRNFTLDMI

SEQ ID NO: 69886 - protein, 13 aa, Homo sapiens
IFVLTHIHVFLLH

SEQ ID NO: 69887 - protein, 57 aa, Homo sapiens
ITMIHVFYSKVLNMGVSFFYSLSLMTQQKRNCRPWDNQHLNKLYNYFFKLSYRVIRL

SEQ ID NO: 69888 - protein, 30 aa, Homo sapiens
LLLWTLLLFAAPFGLLGEKTRQVRALGLQR

SEQ ID NO: 69889 - protein, 288 aa, Homo sapiens
LCLFILAILLCSLALGSVTVHSSEPEVRIPENNPVKLSCAYSGFSSPRVEWKFDQGDTTRLVCYNNKITASYEDRVTFLPTGITFKSVTREDTGTYTCMVSEEGGNSYGEVKVKLIVLVPPSKPTVNIPSSATIGNRAVLTCSEQDGSPPSEYTWFKDGIVMPTNPKSTRAFSNSSYVLNPTTGELVFDPLSASDTGEYSCEARNGYGTPMTSNAVRMEAVERNVGVIVAAVLVTLILLGILVFGIWFAYSRGHFDRTKKGTSSKKVIYSQPSARSEGEFKQTSSFLV

SEQ ID NO: 69890 - protein, 140 aa, Homo sapiens
LTFVLFLSLAFGASYGTGGRMMNCPKILRQLGSKVLLPLTYERINKSMNKSIHIVVTMAKSLENSVENKIVSLDPSEAGPPRYLGDRYKFYLENLTLGIRESRKEDEGWYLMTLEKNVSVQRFCLQLRLYGNNGGFPSPH

SEQ ID NO: 69891 - protein, 66 aa, Homo sapiens
KVRFAALITVLALAEKLKENYIVLLPESIPFLAELMEDECEEVEHQCQKTIQQLETVLGEPLQSYF

SEQ ID NO: 69892 - protein, 288 aa, Homo sapiens
INPMQLGVWFSLGCAYLALEDYQGSAKAFQRCVTLEPDNAEAWNNLSTSYIRLKQKVKAFRTLQEALKCNYEHWQIWENYILTSTDVGEFSEAIKAYHRLLDLRDKYKDVQVLKILVRAVIDGMTDRSGDVATGLKGKLQELFGRVTSRVTNDGEIWRLYAHVYGNGQSEKPDENEKAFQCLSKAYKCDTQSNCWEKDITSFKEVVQRALGLAHVAIKCSKNKSSSQEAVQMLSSVRLNLRGLLSKAKQLFTDVATGEMSRELADDITAMDTLVTELQDLSNQFRNQY

SEQ ID NO: 69893 - protein, 16 aa, Homo sapiens
LKNIMLMVLGMVYVMA

SEQ ID NO: 69894 - protein, 12 aa, Homo sapiens
IVLYCFILTLFP

SEQ ID NO: 69895 - protein, 349 aa, Homo sapiens
LAFCIFMVRLIFERFVAKPCAIALNIQANGPQIAPPNAILEKVFTAITKHPDEKRLEGLSKQLDWDVRSIQRWFRQRRNQEKPSTLTRFCESMWRFSFYLYVFTYGVRFLKKTPWLWNTRHCWYNYPYQPLTTDLHYYYILELSFYWSLMFSQFTDIKRKDFGIMFLHHLVSIFLITFSYVNNMARVGTLVLCLHDSADALLEAAKMANYAKFQKMCDLLFVMFAVVFITTRLGIFPLWVLNTTLFESWEIVGPYPSWWVFNLLLLLVQGLNCFWSYLIVKIACKAVSRGKAGKWNPLHVSKDDRSDIESSSDEEDSEPPGKNPHTATTTNGTSGTNGYLLTGSCSMDD

SEQ ID NO: 69896 - protein, 23 aa, Homo sapiens
MTVCVFWLMCMCRLNPGIYPQQV

SEQ ID NO: 69897 - protein, 71 aa, Homo sapiens
RQRFSDALRRSHLLMLLTFCPCSSSHLEHFQFWFCGAAGLSLSGEGGSWSRRRSSGKSRRLPGQLPHWKGF

SEQ ID NO: 69898 - protein, 23 aa, Homo sapiens
RSFLTSVKRLFVFLLSLLHFNSF

SEQ ID NO: 69899 - protein, 334 aa, Homo sapiens
RMSPWSWFLLQTLCLLPTGAASRRGAPGTANCELKPQQSELNSFLWTIKRDPPSYFFGTIHVPYTRVWDFIPDNSKEAFLQSSIVYFELDLTDPYTISALTSCQMLPQGENLQDVLPRDIYCRLKRHLEYVKLMMPLWMTPDQRGKGLYADYLFNAIAGNWERKRPVWVMLMVNSLTEVDIKSRGVPVLDLFLAQEAERLRKQTGAVEKVEEQCHPLNGLNFSQVIFALNQTLLQQESLRAGSLQIPYTTEDLIKHYNCGDLSSVILSHDSSQVPNFINATLPPQERITAQEIDSYLRRELIYKRNERIGKRVKALLEEFPDKGFFFAFGAASQ

SEQ ID NO: 69900 - protein, 178 aa, Homo sapiens
VRACWNELFTLGLAQCAQVMSLSTILAAIVNHLQNSIQEDKLSGDRIKQVMEHIWKLQEFCNSMAKLDIDGYEYAYLKAIVLFSPDHPGLTSTSQIEKFQEKAQMELQDYVQKTYSEDTYRLARILVRLPALRLMSSNITEELFFTGLIGNVSIDSIIPYILKMETAEYNGQITGASL

SEQ ID NO: 69901 - protein, 64 aa, Homo sapiens
KLLLLWLVLSLLGIQLAWGFYGNTVTGLYHRPGLGGQNGSTPDGSTHFPSWEMAANEPLKTHRE

SEQ ID NO: 69902 - protein, 37 aa, Homo sapiens
RQKFIITGLMLCNLHIVLPHEASFVMAGAGVGELQCL

SEQ ID NO: 69903 - protein, 42 aa, Homo sapiens
LLDSNICLWVVLPIVITLRRHDPPLRVHPAGERQEAHPGTSI

SEQ ID NO: 69904 - protein, 29 aa, Homo sapiens
ILFHIGVAFLSSYQILTRQLQEKQSDCGV

SEQ ID NO: 69905 - protein, 74 aa, Homo sapiens
LLILTILTIWLFKNHRFRFLHETGGAMVYDKPPKFAMSREQMSQSCSHTAHNASLLTDAGPLSCGESRASCLFL

SEQ ID NO: 69906 - protein, 12 aa, Homo sapiens
ILLMLINLIGFS

SEQ ID NO: 69907 - protein, 268 aa, Homo sapiens
LILVVVLAVVVPRWRQQWSGPGTTKRFPETVLARCVKYTEIHPEMRHVDCQSVWDAFKGAFISKHPCNITEEDYQPLMKLGTQTVPCNKILLWSRIKDLAHQFTQVQRDMFTLEDTLLGYLADDLTWCGEFNTSKINYQSCPDWRKDCSNNPVSVFWKTVSRRFAEAACDVVHVMLNGSRSKIFDKNSTFGSVEVHNLQPEKVQTLEAWVIHGGREDSRDLCQDPTIKELESIISKRNIQFSCKNIYRPDKFLQCVKNPEDSSCTSEI

SEQ ID NO: 69908 - protein, 20 aa, Homo sapiens
ILFFLVMCSFSLLFLDWYDS

SEQ ID NO: 69909 - protein, 10 aa, Homo sapiens
LLWPSMFCFL

SEQ ID NO: 69910 - protein, 6 aa, Homo sapiens
IGLLLI

SEQ ID NO: 69911 - protein, 10 aa, Homo sapiens
KLLAWLAVGM

SEQ ID NO: 69912 - protein, 27 aa, Homo sapiens
LLLLMLLILALWKIGFFKRPLKKKMEK

SEQ ID NO: 69913 - protein, 60 aa, Homo sapiens
IVQFIFILKLGTAFFMVLFQKPFSSGKTITKHQIIGSLKIPGRKEFKDKKLNDPRKLVGN

SEQ ID NO: 69914 - protein, 118 aa, Homo sapiens
LDMRGRCSAGQKVLASLIIRLALAETFCLNCGIIALDEPTTNLDRENIESLAHALVEIIKSRSQQRNFQLLVITHDEDFVELLGRSEYVEKFYRIKKNIDQCSEIVKCSVSSLGFNVH

SEQ ID NO: 69915 - protein, 18 aa, Homo sapiens
LLLCSSWTMFLINICLSA

SEQ ID NO: 69916 - protein, 89 aa, Homo sapiens
ILSLTLCRFLAWNYFAHLRLEVLQLTRHPENWTLQARWRLVGLPVHLLFLRFYKRDKDEHYRTYDAYSTFYLNSSGLICRHRLDKVSPR

SEQ ID NO: 69917 - protein, 41 aa, Homo sapiens
IFFGSTTILMNFLYLLGEVLNNYIWDTQKSMEEEKEKPKLE

SEQ ID NO: 69918 - protein, 62 aa, Homo sapiens
LKRGFAMILGTGMMNGTILSKWLPQTHPWPEVDFSTTHWKKYTYLSFATSSEGQSLSFQTKC

SEQ ID NO: 69919 - protein, 614 aa, Homo sapiens
ILGGSLFLTYEVLALKKAVTLDTQVVEREKMKSYIYVHTVSLDKGENHGIAWQARKELHKAVRKVLATSAKILRNPFADPFSTVDIEDHECAVWLLLRKSKSDDKTTRLEAVREMSETHHWHDYQYRIIAQACDPKTLIGLARSEESDLRFFLLPPPLPSLKEDSSTEEELRQLLASLPQTELDECIQYFTSLALSESSQSLAAQKGGLWCFGGNGLPYAESFGEVPSATVEMFCLEAIVKHSEISTHCDKIEANGGLQLLQRLYRLHKDCPKVQRNIMRVIGNMALNEHLHSSIVRSGWVSIMAEAMKSPHIMESSHAARILANLDRETVQEKYQDGVYVLHPQYRTSQPIKADVLFIHGLMGAAFKTWRQQDSEQAVIEKPMEDEDRYTTCWPKTWLAKDCPALRIISVEYDTSLSDWRARCPMERKSIAFRSNELLRKLRAAGVGDRPVVWISHSMGGLLVKKMLLEASTKPEMSTVINNTRGIIFYSVPHHGSRLAEYSVNIRYLLFPSLEVKELSKDSPALKTLQDDFLEFAKDKNFQVLNFVETLPTYIGSMIKLHVVPVESADLGIGDLIPVDVNHLNICKPKKKDAFLYQRTLQFIREALAKDLEN

SEQ ID NO: 69920 - protein, 171 aa, Homo sapiens
ILVLMLLLGCAAVVVCVRLRLQKHRPPADPCRGETETMNNLANCQREKDISVSIIGATQIKNTNKKADFHGDHSADKNGFKARYPAVDYNLVQDLKGDDTAVRDAHSKRDTKCQPQGSSGEEKGTPTTLRGGEASERKRPDSGCSTSKDTKYQSVYVISEEKDECVIATEV

SEQ ID NO: 69921 - protein, 9 aa, Homo sapiens
ICNCFLFFV

SEQ ID NO: 69922 - protein, 129 aa, Homo sapiens
IAGTILVLALILGITAWGYKNYREQRSNGLSHSWSERIPDTKHISDICENGRPRSNSWQGNLGGNKKKIRGKRFRPRSNSTETLSPAKSPSSSTGSIASSRKYPYPMPPLPDEDKKVNRQSARLWETSI

SEQ ID NO: 69923 - protein, 53 aa, Homo sapiens
LFLHCLVFLVLYKLAWSESMERDCATFCAKKFADHLHKFHENDNGAAAGDLWQ

SEQ ID NO: 69924 - protein, 712 aa, Homo sapiens
KKAKMKDMPLRIHVLLGLAITTLVQAVDKKVDCPRLCTCEIRPWFTPRSIYMEASTVDCNDLGLLTFPARLPANTQILLLQTNNIAKIEYSTDFPVNLTGLDLSQNNLSSVTNINVKKMPQLLSVYLEENKLTELPEKCLSELSNLQELYINHNLLSTISPGAFIGLHNLLRLHLNSNRLQMINSKWFDALPNLEILMIGENPIIRIKDMNFKPLINLRSLVIAGINLTEIPDNALVGLENLESISFYDNRLIKVPHVALQKVVNLKFLDLNKNPINRIRRGDFSNMLHLKELGINNMPELISIDSLAVDNLPDLRKIEATNNPRLSYIHPNAFFRLPKLESLMLNSNALSALYHGTIESLPNLKEISIHSNPIRCDCVIRWMNMNKTNIRFMEPDSLFCVDPPEFQGQNVRQVHFRDMMEICLPLIAPESFPSNLNVEAGSYVSFHCRATAEPQPEIYWITPSGQKLLPNTLTDKFYVHSEGTLDINGVTPKEGGLYTCIATNLVGADLKSVMIKVDGSFPQDNNGSLNIKIRDIQANSVLVSWKASSKILKSSVKWTAFVKTENSHAAQSARIPSDVKVYNLTHLNPSTEYKICIDIPTIYQKNRKKCVNVTTKGLHPDQKEYEKNNTTTLMACLGGLLGIIGVICLISCLSPEMNCDGGHSYVRNYLQKPTFALGELYPPLINLWEAGKEKSTSLKVKATVIGLPTNMS

SEQ ID NO: 69925 - protein, 66 aa, Homo sapiens
IPLFVFIGTGATGATLYLLRLALFNPDVCWDRNNPEPWNKLGPNDQYKFYSVNVDYSKLKKERPDF

SEQ ID NO: 69926 - protein, 22 aa, Homo sapiens
VLLFSTHFIILLKDVIVVILNS

SEQ ID NO: 69927 - protein, 145 aa, Homo sapiens
KKAHELLVLNGLLLIITPDSSHQNRHAMMMKSWKIAIESLGFKRFKYSKFSHMHLMAFRKISLKTTSDLVSRNYPGMLYIPQDFNSIEDEEYSNPSCYVRSDIEDEQLAYGFTELPDAPYDSDSGESQASSIPFYELEDPILLLS

SEQ ID NO: 69928 - protein, 93 aa, Homo sapiens
IFAFGLTLWEMMTLSIPHINLSNDDDDEDKTFDESDFDDEAYYAALGTRPPINMEELDESYQKVIELFSVCTNEDPKDRPSAAHIVEALETDV

SEQ ID NO: 69929 - protein, 29 aa, Homo sapiens
IAYLLGLICLIRACYWGAIRVSYPEHSFA

SEQ ID NO: 69930 - protein, 14 aa, Homo sapiens
RKKITSLSMLLLIL

SEQ ID NO: 69931 - protein, 26 aa, Homo sapiens
IGCILGMFPLIFFGGGEEDEKLETKS

SEQ ID NO: 69932 - protein, 132 aa, Homo sapiens
LDFFLLIFATAVVAWADHTAPLLLGLSASWLPWHQENGPAGPVPSFLGRSPMHRVTLQEVLTLLPNSMALLLQKEPWKEQTQKFIDWLFSIMESPKEALSAQSRDLLKATLLSLRVLPEFKKKAVWTRAYGW

SEQ ID NO: 69933 - protein, 101 aa, Homo sapiens
TWFCLLRPLFALSFHFLQRASRMAHKQIYYSDKYFDEHYEYRHVMLPRELSKQVPKTHLMSEEEWRRLGVQQSLGWVHYMIHEPEPHILLFRRPLPKDQQK

SEQ ID NO: 69934 - protein, 13 aa, Homo sapiens
LHPLFLIFIMSCA

SEQ ID NO: 69935 - protein, 132 aa, Homo sapiens
ISSYQVLVLPLALQSTFSCDSEGASSFFSNASDADGYVAAELLAKDVPDDAMEIPIGDRLYYGEYYNAPLKRGSDYCIILRITSEWNKVRRHSCAVWAQVKDSSLMLLQMAGVGLGSLAVVIILTFLSFSAV

SEQ ID NO: 69936 - protein, 49 aa, Homo sapiens
IFTYYTAWVILLVCHSPRPLLTFPEPWHRQSNYYIGSRHGAGFIACLIS

SEQ ID NO: 69937 - protein, 8 aa, Homo sapiens
MLWYLALT

SEQ ID NO: 69938 - protein, 60 aa, Homo sapiens
IIGIIDILFAPLCFFLRSPPAKEEKMAILMDHNCPIKTKMYTQNNIQSYPIGEDEESESD

SEQ ID NO: 69939 - protein, 34 aa, Homo sapiens
IGSLLLIFLFYSVMFKLRNALCGSSESHLWFSRH

SEQ ID NO: 69940 - protein, 128 aa, Homo sapiens
VQLMPILILILVSALSQLMVSSPPYSLSPRPSVGHIHRRVTDHLGVVYYVGDTFSEEYTGSSLKTVERNVEDDYIANLRNNCWKEKQQKEGLLYRARYFGDTDMYHRAQKMGTPSCSRLSEVQASLHG

SEQ ID NO: 69941 - protein, 130 aa, Homo sapiens
VQLMPILILILVSALSQLMVSSPPYSLSPRPSVGHIHRRVTDHLGVVYYVGDTFSEEYTGSSLKTVERNVEDDYIANLRNNCWKEKQQKEGLLYRARYFGDTDMYHRAQKMGTPSCSRLSETMKSLENFW

SEQ ID NO: 69942 - protein, 31 aa, Homo sapiens
LGFIMLSRLVLNSWAQAISPPLPPKALRLQA

SEQ ID NO: 69943 - protein, 18 aa, Homo sapiens
LGQEKSKTIFLLLSVLMH

SEQ ID NO: 69944 - protein, 1317 aa, Homo sapiens
LPLLLLLLRLGQILCAGGTPSPIPDPSVATVATGENGITQISSTAESFHKQNGTGTPQVETNTSEDGESSGANDSLRTPEQGSNGTDGASQKTPSSTGPSPVFDIKAVSISPTNVILTWKSNDTAASEYKYVVKHKMENEKTITVVHQPWCNITGLRPATSYVFSITPGIGNETWGDPRVIKVITEPIPVSDLRVALTGVRKAALSWSNGNGTASCRVLLESIGSHEELTQDSRLQVNISGLKPGVQYNINPYLLQSNKTKGDPLGTEGGLDASNTERSRAGSPTAPVHDESLVGPVDPSSGQQSRDTEVLLVGLEPGTRYNATVYSQAANGTEGQPQAIEFRTNAIQVFDVTAVNISATSLTLIWKVSDNESSSNYTYKIHVAGETDSSNLNVSEPRAVIPGLRSSTFYNITVCPVLGDIEGTPGFLQVHTPPVPVSDFRVTVVSTTEIGLAWSSHDAESFQMHITQEGAGNSRVEITTNQSIIIGGLFPGTKYCFEIVPKGPNGTEGASRTVCNRTVPSAVFDIHVVYVTTTEMWLDWKSPDGASEYVYHLVIESKHGSNHTSTYDKAITLQGLIPGTLYNITISPEVDHVWGDPNSTAQYTRPSNVSNIDVSTNTTAATLSWQNFDDASPTYSYCLLIEKAGNSSNATQVVTDIGITDATVTELIPGSSYTVEIFAQVGDGIKSLEPGRKSFCTDPASMASFDCEVVPKEPALVLKWTCPPGANAGFELEVSSGAWNNATHLESCSSENGTEYRTEVTYLNFSTSYNISITTVSCGKMAAPTRNTCTTGITDPPPPDGSPNITSVSHNSVKVKFSGFEASHGPIKAYAVILTTGEAGHPSADVLKYTYEDFKKGASDTYVTYLIRTEEKGRSQSLSEVLKYEIDVGNESTTLGYYNGKLEPLGSYRACVAGFTNITFHPQNKGLIDGAESYVSFSRYSDAVSLPQDPGVICGAVFGCIFGALVIVTVGGFIFWRKKRKDAKNNEVSFSQIKPKKSKLIRVENFEAYFKKQQADSNCGFAEEYEDLKLVGISQPKYAAELAENRGKNRYNNVLPYDISRVKLSVQTHSTDDYINANYMPGYHSKKDFIATQGPLPNTLKDFWRMVWEKNVYAIIMLTKCVEQGRTKCEEYWPSKQAQDYGDITVAMTSEIVLPEWTIRDFTVKNIQTSESHPLRQFHFTSWPDHGVPDTTDLLINFRYLVRDYMKQSPPESPILVHCSAGVGRTGTFIAIDRLIYQIENENTVDVYGIVYDLRMHRPLMVQTEDQYVFLNQCVLDIVRSQKDSKVDLIYQNTTAMTIYENLAPVTTFGKTNGYIA

SEQ ID NO: 69945 - protein, 53 aa, Homo sapiens
RPSLVVLFFMSTASRILQSSSTSSSFSSCSSTPSSSRLAWSTSYSISSKGPSS

SEQ ID NO: 69946 - protein, 21 aa, Homo sapiens
ISITLRFLLLMRTLSAYAKKF

SEQ ID NO: 69947 - protein, 34 aa, Homo sapiens
TPLHMAALLLLPWLMLLTAPSSLRNSDLQATCTS

SEQ ID NO: 69948 - protein, 519 aa, Homo sapiens
TGTGNWFSALALGVTLLKCLLIPTYHSTDFEVHRNWLAITHSLPISQWYYEATSEWTLDYPPFFAWFEYILSHVAKYFDQEMLNVHNLNYSSSRTLLFQRFSVIFMDVLFVYAVRECCKCIDGKKVGKELTEKPKFILSVLLLWNFGLLIVDHIHFQYNGFLFGLMLLSIARLFQKRHMEGAFLFAVLLHFKHIYLYVAPAYGVYLLRSYCFTANKPDGSIRWKSFSFVRVISLGLVVFLVSALSLGPFLALNQLPQVFSRLFPFKRGLCHAYWAPNFWALYNALDKVLSVIGLKLKFLDPNNIPKASMTSGLVQQFQHTVLPSVTPLATLICTLIAILPSIFCLWFKPQGPRGFLRCLTLCALSSFMFGWHVHEKAILLAILPMSLLSVGKAGDASIFLILTTTGHYSLFPLLFTAPELPIKILLMLLFTIYSISSLKTLFRKEKPLFNWMETFYLLGLGPLEVCCEFVFPFTSWKVKYPFIPLLLTSVYCAVGITYAWFKLYVSVLIDSAIGKTKKQ

SEQ ID NO: 69949 - protein, 250 aa, Homo sapiens
VGTFAGLLIGLAQLNCSELKLKRLCCRHGLLGVDKVLGYALNEWLQDIRKNQLPGLLGGVGPMHSVVQLFQGFRDLLWLPIEQYRKDGRLMRGLQRGAASFGSSTASAALELSNRLVQAIQATAETVYDILSPAAPVSRSLQDKRSARRLRRGQQPADLREGVAKAYDTVREGILDTAQTICDVASRGHEQKGLTGAVGGVIRQLPPTVVKPLILATEATSSLLGGMRNQIVPDAHKDHALKWRSDSAQD

SEQ ID NO: 69950 - protein, 18 aa, Homo sapiens
IFHSLFLLNFFILNFQIL

SEQ ID NO: 69951 - protein, 19 aa, Homo sapiens
ICFCFSFIIGVLYLVLRKK

SEQ ID NO: 69952 - protein, 330 aa, Homo sapiens
LGSFILVIFYFQSMLHPVMRRNPFGVDICCRKGSRSPLQELYNPIQLELSNTAVLHQMRRDQVTDTCRANSATSRKRRVLTPNDLKHLVVDEDHELIYCYVPKVACTNWKRLMMVLTGRGKYSDPMEIPANEAHVSANLKTLNQYSIPEINHRLKSYMKFLFVREPFERLVSAYRNKFTQKYNISFHKRYGTKIIKRQRKNATQEALRKGDDVKFEEFVAYLIDPHTQREEPFNEHWQTVYSLCHPCHIHYDLVGKYETLEEDSNYVLQLAGVGSYLKFPTYAKSTRTTDEMTTEFFQNISSEHQTQLYEVYKLDFLMFNYSVPSYLKLE

SEQ ID NO: 69953 - protein, 84 aa, Homo sapiens
LFRKLVLSRHVLQFLLLYQEPLLALDVDSTNSRLRHCAYRCYATWRFGSQDMADFAILPSCCRWRIRKEFPKSEGQYSGFKSPY

SEQ ID NO: 69954 - protein, 14 aa, Homo sapiens
LSLLSPTITLGLFL

SEQ ID NO: 69955 - protein, 65 aa, Homo sapiens
RGLETHRPHAMRALWVLGLCCVLLTFGSVRADDEVDVDGTVEEDLGKSREGSRTDDEVVQRFVFI

SEQ ID NO: 69956 - protein, 35 aa, Homo sapiens
LKFGQVFKIVQCLPLCLHLVSVAMGGVSILTNVNV

SEQ ID NO: 69957 - protein, 10 aa, Homo sapiens
LFVLVLDLCL

SEQ ID NO: 69958 - protein, 410 aa, Homo sapiens
LQLLLLLILLGPGNSLQLWDTWADEAEKALGPLLARDRRQATEYEYLDYDFLPETEPPEMLRNSTDTTPLTGPGTPESTTVEPAARRSTGLDAGGAVTELTTELANMGNLSTDSAAMEIQTTQPAATEAQTTQPVPTEAQTTPLAATEAQTTRLTATEAQTTPLAATEAQTTPPAATEAQTTQPTGLEAQTTAPAAMEAQTTAPAAMEAQTTPPAAMEAQTTQTTAMEAQTTAPEATEAQTTQPTATEAQTTPLAAMEALSTEPSATEALSMEPTTKRGLFIPFSVSSVTHKGIPMAASNLSVNYPVGAPDHISVKQCLLAILILALVATIFFVCTVVLAVRLSRKGHMYPVRNYSPTEMVCISSLLPDGGEGPSATANGGLSKAKSPGLTPEPREDREGDDLTLHSFLP

SEQ ID NO: 69959 - protein, 19 aa, Homo sapiens
LLVTVILMAFCVYKPIRRR

SEQ ID NO: 69960 - protein, 42 aa, Homo sapiens
KSWLSRSVTSFFRFLLGSSLSLQPLQVNPRACYRLAVVPYEI

SEQ ID NO: 69961 - protein, 88 aa, Homo sapiens
IVCGTLCVCLVIVLWGIRLLLQRKKKLVSTSKNGKNQMVIAFFHPYCNAGGGGERVLWCALRALQKKSCGVYGSWHNYPCTQFGGPKA

SEQ ID NO: 69962 - protein, 331 aa, Homo sapiens
IDNVAILFNFLMDFLTNCIGLMEVYKNTPETVNLIIEVFVEVAHKQICYLGESKAMNLYEACLTLLQVYSKNNLGRQRIDVTAEEEQYQDLLLIMELLTNLLSKEFIDFSDTDEVFRGHEPGQAANRSVSAADVVLYGVNLILPLMSQDLLKFPTLCNQYYKLITFICEIFPEKIPQLPEDLFKSLMYSLELGMTSMSSEVCQLCLEALTPLAEQCAKAQETDSPLFLATRHFLKLVFDMLVLQKHNTEMTTAAGEAFYTLVCLHQAEYSELVETLLSSQQDPVIYQRLADAFNKLTASSTPPTLDRKQKMAFLKSLEEFMANVGGLLCVK

SEQ ID NO: 69963 - protein, 67 aa, Homo sapiens
VGRAHLFFLSVICFLFMAERTFEMRPSLQVVMRLVDCAVTVEISPVLPLRRWDLTKGNVREILMAQV

SEQ ID NO: 69964 - protein, 39 aa, Homo sapiens
LSPLPTLPPLTLLLTLLEPCLPGGPISSGRPCLWATWSV

SEQ ID NO: 69965 - protein, 47 aa, Homo sapiens
LVSPLSPRRMAARVFYLLLVLSAQQILHVKQEKPYGRLLIQPGPRFH

SEQ ID NO: 69966 - protein, 248 aa, Homo sapiens
KMQPILLLLAFLLLPRADAGEIIGGHEAKPHSRPYMAYLMIWDQKSLKRCGGFLIRDDFVLTAAHCWGSSINVTLGAHNIKEQEPTQQFIPVKRPIPHPAYNPKNFSNDIMLLQLERKAKRTRAVQPLRLPSNKAQVKPGQTCSVAGWGQTAPLGKHSHTLQEVKMTVQEDRKCESDLRHYYDSTIELCVGDPEIKKTSFKGDSGGPLVCNKVAQGIVSYGRNNGMPPRACTKVSSFVHWIKKTMKRY

SEQ ID NO: 69967 - protein, 53 aa, Homo sapiens
VSIFGYFILGTVVNKTLMGPIVMKLVHQEKLEGDFRFKHMQIRVNAEPAAFYR

SEQ ID NO: 69968 - protein, 786 aa, Homo sapiens
LLLCAVLLSLASASSDEEGSQDESLDSKTTLTSDESVKDHTTAGRVVAGQIFLDSEESELESSIQEEEDSLKSQEGESVTEDISFLESPNPENKDYEEPKKVRKPALTAIEGTAHGEPCHFPFLFLDKEYDECTSDGREDGRLWCATTYDYKADEKWGFCETEEEAAKRRQMQEAEMMYQTGMKILNGSNKKSQKREAYRYLQKAASMNHTKALERVSYALLFGDYLPQNIQAAREMFEKLTEEGSPKGQTALGFLYASGLGVNSSQAKALVYYTFGALGGNLIAHMVLGYRYWAGIGVLQSCESALTHYRLVANHVASDISLTGGSVVQRIRLPDEVENPGMNSGMLEEDLIQYYQFLAEKGDVQAQVGLGQLHLHGGRGVEQNHQRAFDYFNLAANAGNSHAMAFLGKMYSEGSDIVPQSNETALHYFKKAADMGNPVGQSGLGMAYLYGRGVQVNYDLALKYFQKAAEQGWVDGQLQLGSMYYNGIGVKRDYKQALKYFNLASQGGHILAFYNLAQMHASGTGVMRSCHTAVELFKNVCERGRWSERLMTAYNSYKDGDYNAAVIQYLLLAEQGYEVAQSNAAFILDQREASIVGENETYPRALLHWNRAASQGYTVARIKLGDYHFYGFGTDVDYETAFIHYRLASEQQHSAQAMFNLGYMHEKGLGIKQDIHLAKRFYDMAAEASPDAQVPVFLALCKLGVVYFLQYIRETNIRDMFTQLDMDQLLGPEWDLYLMTIIALLLGTVIAYRQRQHQDMPAPRPPGPRPAPPQQEGPPEQQPPQ

SEQ ID NO: 69969 - protein, 11 aa, Homo sapiens
RCRALFLVFII

SEQ ID NO: 69970 - protein, 21 aa, Homo sapiens
KLTFSPFQVLSLLLVLQPPPH

SEQ ID NO: 69971 - protein, 126 aa, Homo sapiens
VLPLLCLGAGFLFLNTLFIQRGRHETTWTILRRFGYSDALELTADYLSPLIHVPPGCSTELNHLGYQFVQRVFEKHDQDRDGALSPVELQSLFSVFPAAPWGPELPRTVRTEAGRLPLHGYLCQWT

SEQ ID NO: 69972 - protein, 688 aa, Homo sapiens
LLQTTLFLLSLLFLVQGAHGRGHREDFRFCSQRNQTHRSSLHYKPTPDLRISIENSEEALTVHAPFPAAHPASRSFPDPRGLYHFCLYWNRHAGRLHLLYGKRDFLLSDKASSLLCFQHQEESLAQGPPLLATSVTSWWSPQNISLPSAASFTFSFHSPPHTAAHNASVDMCELKRDLQLLSQFLKHPQKASRRPSAAPASQQLQSLESKLTSVRFMGDMVSFEEDRINATVWKLQPTAGLQDLHIHSRQEEEQSEIMEYSVLLPRTLFQRTKGRSGEAEKRLLLVDFSSQALFQDKNSSQVLGEKVLGIVVQNTKVANLTEPVVLTFQHQLQPKNVTLQCVFWVEDPTLSSPGHWSSAGCETVRRETQTSCFCNHLTYFAVLMVSSVEVDAVHKHYLSLLSYVGCVVSALACLVTIAAYLCSRVPLPCRRKPRDYTIKVHMNLLLAVFLLDTSFLLSEPVALTGSEAGCRASAIFLHFSLLTCLSWMGLEGYNLYRLVVEVFGTYVPGYLLKLSAMGWGFPIFLVTLVALVDVDNYGPIILAVHRTPEGVIYPSMCWIRDSLVSYITNLGLFSLVFLFNMAMLATMVVQILRLRPHTQKWSHVLTLLGLSLVLGLPWALIFFSFASGTFQLVVLYLFSIITSFQGFLIFIWYWSMRLQARGGPSPLKSNSDSARLPISSGSTSSSRI

SEQ ID NO: 69973 - protein, 249 aa, Homo sapiens
KVIFYAKDIAPPLIAFGATHSLLTSFCVCTGPGHQQTGYAFTHLSLQEFLAALHLMASPKVNKDTLTQYVTLHSRWVQRTKARLGLSDHLPTFLAGLASCTCRPFLSHLAQGNEDCVGAKQAAVVQVLKKLATRKLTGPKVVELCHCVDETQEPELASLTAQSLPYQLPFHNFPLTCTDLATLTNILEHREAPIHLDFDGCPLEPHCPEALVGCGQIENLSFKSRKCGDAFAEALSRSLPTMGRLQMLG

SEQ ID NO: 69974 - protein, 29 aa, Homo sapiens
ILCILMCMILRFKKGFASEAGSVCIKNDL

SEQ ID NO: 69975 - protein, 33 aa, Homo sapiens
LGSFLLLFCGLLCCVTAMCFHPRRESHWSRTRL

SEQ ID NO: 69976 - protein, 10 aa, Homo sapiens
MRSMFYLLGI

SEQ ID NO: 69977 - protein, 57 aa, Homo sapiens
KISYEIGLMNFVLGFFCCFMGCDLGCCLIPCLINDFKDVTHTCPSCKAYIYTYKRLC

SEQ ID NO: 69978 - protein, 16 aa, Homo sapiens
RMTAFSLTLTFLWQSS

SEQ ID NO: 69979 - protein, 7 aa, Homo sapiens
VYFFVVV

SEQ ID NO: 69980 - protein, 13 aa, Homo sapiens
ITHLILCVFIIKL

SEQ ID NO: 69981 - protein, 197 aa, Homo sapiens
IQCFLVVVALLCVPWMLLFKPLVLRRQYLRRKHLGTLNFGGIRVGNGPTEEDAEIIQHDQLSTHSEDADEFDFGDTMVHQAIHTIEYCLGCISNTASYLRLWALSLAHAQLSEVLWTMVIHIGLSVKSLAGGLVLFFFFTAFATLTVAILLIMEGLSAFLHALRLHWVEFQNKFYSGTGFKFLPFSFEHIREGKFEE

SEQ ID NO: 69982 - protein, 43 aa, Homo sapiens
LGIQLSNFLFLVWLLWCAKLRTLLFCHTATPYRCGRCEICHQL

SEQ ID NO: 69983 - protein, 47 aa, Homo sapiens
VVLFGISITGGLFYTIFKELFSSSSPSKIYGRALEKCRSHPEVSSQD

SEQ ID NO: 69984 - protein, 11 aa, Homo sapiens
IQTLSVILTFF

SEQ ID NO: 69985 - protein, 17 aa, Homo sapiens
MWIILLLWSLEADYDLD

SEQ ID NO: 69986 - protein, 124 aa, Homo sapiens
KSWTALRLCATVVVLDMVVCKGFVEDLDESFKENRNDDIWLVDFYAPWCGHCKKLEPIWNEVGLEMKSIGSPVKVGKMDATSYSSIASEFGVRGYPTIKLRFPGGLKIGVWPFFIGEIKRGLGI

SEQ ID NO: 69987 - protein, 191 aa, Homo sapiens
KSWTALRLCATVVVLDMVVCKGFVEDLDESFKENRNDDIWLVDFYAPWCGHCKKLEPIWNEVGLEMKSIGSPVKVGKMDATSYSSIASEFGVRGYPTIKLLKGDLAYNYRGPRTKDDIIEFAHRVSGALIRPLPSQQMFEHMQKRHRVFFVYVGGESPLKEKYIDAASELIVYTYFFSASEEVVPEVIFKI

SEQ ID NO: 69988 - protein, 450 aa, Homo sapiens
KSWTALRLCATVVVLDMVVCKGFVEDLDESFKENRNDDIWLVDFYAPWCGHCKKLEPIWNEVGLEMKSIGSPVKVGKMDATSYSSIASEFGVRGYPTIKLLKGDLAYNYRGPRTKDDIIEFAHRVSGALIRPLPSQQMFEHMQKRHRVFFVYVGGESPLKEKYIDAASELIVYTYFFSASEEVVPEYVTLKEMPAVLVFKDETYFVYDEYEDGDLSSWINRERFQNYLAMDGFLLYELGDTGKLVALAVIDEKNTSVEHTRLKSIIQEVARDYRDLFHRDFQFGHMDGNDYINTLLMDELTVPTVVVLNTSNQQYFLLDRQIKNVEDMVQFINNILDGTVEAQGGDSILQRLKRIVFDAKSTIVSIFKSSPLMGCFLFGLPLGVISIMCYGIYTADTDGGYIEERYEVSKSENENQEQIEESKEQQEPSSGGSVVPTVQEPKDVLEKKKD

SEQ ID NO: 69989 - protein, 31 aa, Homo sapiens
LESIFFPCIFLSLWVSLILAPSGQTSSSNSW

SEQ ID NO: 69990 - protein, 244 aa, Homo sapiens
RRHEGPPAEMTVLAPAWSPTTYLLLLLLLSSGLSGTQDCSFQHSPISSDFAVKIRELSDYLLQDYPVTVASNLQDEELCGGLWRLVLAQRWMERLKTVAGSKMQGLLERVNTEIHFVTKCAFQPPPSCLRFVQTNISRLLQETSEQLVALKPWITRQNFSRCLELQCQPDSSTLPPPWSPRPLEATAPTAPQPPLLLLLLLPVGLLLLAAAWCLHWQRTRRRTPRPGEQVPPVPSPQDLLLVEH

SEQ ID NO: 69991 - protein, 44 aa, Homo sapiens
IYFCIHFLALAALGLGLALGGGSPSRRKAASQPTSLAPEKLREE

SEQ ID NO: 69992 - protein, 15 aa, Homo sapiens
LALISSLGKLLTLTL

SEQ ID NO: 69993 - protein, 59 aa, Homo sapiens
LLLSLWALCTACRRPEDAVAPRKRARRQRARLQGSATAAEAQVGHQTARAAPGPAQQQG

SEQ ID NO: 69994 - protein, 18 aa, Homo sapiens
TGMTVAGVVLLGSLFSRK

SEQ ID NO: 69995 - protein, 24 aa, Homo sapiens
RMERITVILFFSCCSVWKPCEEDI

SEQ ID NO: 69996 - protein, 63 aa, Homo sapiens
VGAATGGILLLLDVVSLAYESKHLLEGAKSESAEELKKRAQELEGKLNFLTKIHEMLQPGQDQ

SEQ ID NO: 69997 - protein, 12 aa, Homo sapiens
TSYKIICILFAC

SEQ ID NO: 69998 - protein, 24 aa, Homo sapiens
VAAVFMFAFASLYTQIPGWGICRP

SEQ ID NO: 69999 - protein, 42 aa, Homo sapiens
MFSFSTSHVMLLLQDTALLVLPCTILPMTRGLASYCILRTSS

SEQ ID NO: 70000 - protein, 26 aa, Homo sapiens
LAGVLILVLLAYFIGLKHHHAGYEQF

SEQ ID NO: 70001 - protein, 185 aa, Homo sapiens
MALRHLALLAGLLVGVASKSMENTAQLPECCVDVVGVNASCPGASLCGPGCYRRWNADGSASCVRCGNGTLPAYNGSECRSFAGPGAPFPMNRSSGTPGRPHPGAPRVAASLFLGTFFISSGLILSVAGFFYLKRSSKLPRACYRRNKGPAPAGSLPGRWSSQQFGPQAPALQPGEAVSNPHHPG

SEQ ID NO: 70002 - protein, 112 aa, Homo sapiens
MVVILGASNILWIMFAASQAFKIETTPESRYLAQIGDSVSLTCSTTGCESPFFSWRTQIDSPLNGKVTNEGTTSTLTMNPVSFGNEHSYLCTATCESRKLEKGIQVEIYCWR

SEQ ID NO: 70003 - protein, 129 aa, Homo sapiens
MLLWTAVLLFVPCVGKTVWLYLQAWPNPVFEGDALTLRCQGWKNTPLSQVKFYRDGKFLHFSKENQTLSMGAATVQSRGQYSCSGQVMYIPQTFTQTSETAMVQVQGESPAWEFVGQEVLLKGPVSRGQ

SEQ ID NO: 70004 - protein, 373 aa, Homo sapiens
MPRGWTALCLLSLLPSGFMSLDNNGTATPELPTQGTFSNVSTNVSYQETTTPSTLGSTSLHPVSQHGNEATTNITETTVKFTSTSVITSVYGNTNSSVQSQTSVISTVFTTPANVSTPETTLKPSLSPGNVSDLSTTSTSLATSPTKPYTSSSPILSDIKAEIKCSGIREVKLTQGICLEQNKTSSCAEFKKDRGEGLARVLCGEEQADADAGAQVCSLLLAQSEVRPQCLLLVLANRTEISSKLQLMKKHQSDLKKLGILDFTEQDVASHQSYSQKTLIALVTSGALLAVLGITGYFLMNRRSWSPTGERLGEDPYYTENGGGQGYSSGPGTSPEAQGKASVNRGAQENGTGQATSRNGHSARQHVVADTEL

SEQ ID NO: 70005 - protein, 316 aa, Homo sapiens
MPRGWTALCLLSLLPSGFMSLDNNGTATPELPTQGTFSNVSTNVSYQETTTPSTLGSTSLHPVSQHGNEATTNITETTVKFTSTSVITSVYGNTNSSVQSQTSVISTVFTTPANVSTPETTLKPSLSPGNVSDLSTTSTSLATSPTKPYTSSSPILSDIKAEIKCSGIREVKLTQGICLEQNKTSSCAEFKKDRGEGLARVLCGEEQADADAGAQVCSLLLAQSEVRPQCLLLVLANRTEISSKLQLMKKHQSDLKKLGILDFTEQDVASHQSYSQKTLIALVTSGALLAVLGITGYFLMNRRSWSPTGERLELEP

SEQ ID NO: 70006 - protein, 62 aa, Homo sapiens
MAFVSQLACIYLALIPHDDEVTVTENKINALIKAAGVNVEPFWPGLFAKAWPKSTWGASSAM

SEQ ID NO: 70007 - protein, 97 aa, Homo sapiens
MDLGTIFFLPYLFFLLSSECEHGYASSFPSMPSPRLQHSKPPRRLSRAQKHSSGSSNTSTANRSTHNELEKNRLKNWLVGRRDTRGMKMLLKAIAVI

SEQ ID NO: 70008 - protein, 175 aa, Homo sapiens
MLVLLTFLAFASCCIAAYRPSETLCGGELVDTLQFVCGDRGFYFRLPGRPASRVSRRSRGIVEECCFRSCDLALLETYCATPAKSERDVSTPPTVLPDNFPRYPVGKFFQYDTWKQSTQRLRRGLPALLRARRGHVLAKELEAFREAKRHRPLIALPTQDPAHGGAPPEMASNRK

SEQ ID NO: 70009 - protein, 78 aa, Homo sapiens
MYGKSSTRAVLLLLGIQLTALWPIAAVEIYTSRVLEAVNGTDARLKCTFSSFAPVGDALTVTWNFRPLDGGPEQFYFS

SEQ ID NO: 70010 - protein, 719 aa, Homo sapiens
MKLLLALAGLLAILATPQPSEGAAPAVLGEVDTSLVLSSMEEAKQLVDKAYKERRESIKQRLRSGSASPMELLSYFKQPVAATRTAVRAADYLHVALDLLERKLRSLWRRPFNVTDVLTPAQLNVLSKSSGCAYQDVGVTCPEQDKYRTITGMCNNRRSPTLGASNRAFVRWLPAEYEDGFSLPYGWTPGVKRNGFPVALARAVSNEIVRFPTDQLTPDQERSLMFMQWGQLLDHDLDFTPEPAARASFVTGVNCETSCVQQPPCFPLKIPPNDPRIKNQADCIPFFRSCPACPGSNITIRNQINALTSFVDASMVYGSEEPLARNLRNMSNQLGLLAVNQRFQDNGRALLPFDNLHDDPCLLTNRSARIPCFLAGDTRSSEMPELTSMHTLLLREHNRLATELKSLNPRWDGERLYQEARKIVGAMVQIITYRDYLPLVLGPTAMRKYLPTYRSYNDSVDPRIANVFTNAFRYGHTLIQPFMFRLDNRYQPMEPNPRVPLSRVFFASWRVVLEGGIDPILRGLMATPAKLNRQNQIAVDEIRERLFEQVMRIGLDLPALNMQRSRDHGLPGYNAWRRFCGLPQPETVGQLGTVLRNLKLARKLMEQYGTPNNIDIWMGGVSEPLKRKGRVGPLLACIIGTQFRKLRDGDRFWWENEGVFSMQQRQALAQISLPRIICDNTGITTVSKNNIFMSNSYPRDFVNCSTLPALNLASWREAS

SEQ ID NO: 70011 - protein, 31 aa, Homo sapiens
MILTMLLMLKLCTEVRVANELNARRRSFTVL

SEQ ID NO: 70012 - protein, 245 aa, Homo sapiens
MSPTVIILACLGFFLDQSVWAHVGLYEKPSLTARPGPTVRAGENVTLSCSSQSSFDIYHLSREGEAHELRLPAVPSINGTFQADFPLGPATHGETYRCFGSFHGSPYEWSDPSDPLPVSVTGNPSSSWPSPTEPSFKTDAAVMNQEPAGHRTVNREDSDEQDPQEVTYAQLDHCIFTQRKITGPSQRSKRPSTDTSVCIELPNAEPRALSPAHEHHSQALMGSSRETTALSQTQLASSNVPAAGI

SEQ ID NO: 70013 - protein, 545 aa, Homo sapiens
MAVTLVFSLVTLFVVVQQQTRPVPKPVQAVILGDNITGHLPFEPNNHHHFGREAEMRELIQTFKGHMENSSAWVVEIQMLKCRVDNVNSQLQVLGDHLGNTNADIQMVKGVLKDATTLSLQTQMLRSSLEGTNAEIQRLKEDLEKADALTFQTLNFLKSSLENTSIELHVLSRGLENANSEIQMLNASLETANTQAQLANSSLKNANAEIYVLRGHLDSVNDLRTQNQVLRNSLEGANAEIQGLKENLQNTNALNSQTQAFIKSSFDNTSAEIQFLRGHLERAGDEIHVLKRDLKMVTAQTQKANGRLDQTDTQIQVFKSEMENVNTLNAQIQVLNGHMKNASREIQTLKQGMKNASALTSQTQMLDSNLQKASAEIQRLRGDLENTKALTMEIQQEQSRLKTLHVVITSQEQLQRTQSQLLQMVLQGWKFNGGSLYYFSSVKKSWHEAEQFCVSQGAHLASVASKEEQAFLVEFTSKVYYWIGLTDRGTEGSWRWTDGTPFNAAQNKAPGSKGSCPLRKYIIVNSGMGACSFIDTPPCPWILSN

SEQ ID NO: 70014 - protein, 135 aa, Homo sapiens
MVVLLMLSSLSRLLGLMRPSSLRQYLDSVPLPPCQEQQPKASAELDHKACYLCHSLLMLAGVVVSCQDITPDQWGELQLLCMQLDRHISTQIRESPQAMHRTMLKDLATQTYIRWQELLTHCQPQAQYFSPWKDI

SEQ ID NO: 70015 - protein, 34 aa, Homo sapiens
MIARCLSFSFILTVCRGYMMCDDILIDVNEWCYT

SEQ ID NO: 70016 - protein, 89 aa, Homo sapiens
MLWGLSLFLNLPGPIWLQPSPPPQSSPPPQPHPCHTCRGLVDSFNKGLERTIRDNFGGGNTAWEEENLSKYKDSLSWGNREALRWLRAV

SEQ ID NO: 70017 - protein, 228 aa, Homo sapiens
MLWGLSLFLNLPGPIWLQPSPPPQSSPPPQPHPCHTCRGLVDSFNKGLERTIRDNFGGGNTAWEEENLSKYKDSETRLVEVLEGVCSKSDFECHRLLELSEELVESWWFHKQQEAPDLFQWLCSDSLKLCCPAGTFGPSCLPCPGGTERPCGGYGQCEGEGTRGGSGHCDCQAGYGGEACGQCGLGYFEAERNASHLLVLAPVPDAQDLRNQTVCNARRAGPCITSSV

SEQ ID NO: 70018 - protein, 93 aa, Homo sapiens
MCPARSLLLVATLVLLDHLSLARNLPVATPDPGMFPCLHHSQNLLRAVSNMLQKARQTLEFYPCTSEEIDHEDITKDKTSTVEACLPLELTKV

SEQ ID NO: 70019 - protein, 225 aa, Homo sapiens
MRLHLLLLLALCGAGTTAAELSYSLRGNWSICNGNGSLELPGAVPGCVHSALFQQGLIQDSYYRFNDLNYRWVSLDNWTYSKEFKIPFEISKWQKVNLILEGVDTVSKILFNEVTIGETDNMFNRYSFDITNVVRDVNSIELRFQSAVLYAAQQSKAHTRYQVPPDCPPLVQKGECHVNFVRKEQCSFSWDWGPSFPTQGIWKDVRIEAYNICHLNYFTFSPIYE

SEQ ID NO: 70020 - protein, 21 aa, Homo sapiens
MCVVFLFGLALAVLSFTSSSF

SEQ ID NO: 70021 - protein, 78 aa, Homo sapiens
MAVWSLLSARAVTAFLLLFLPRFLQAQTFSFPFQQPEKCDNNQYFDISALSCVPCGANQRQDARERCYRRWLELHFLP

SEQ ID NO: 70022 - protein, 15 aa, Homo sapiens
MKFFLVFLTFVKAEY

SEQ ID NO: 70023 - protein, 777 aa, Homo sapiens
LSISWQFLIVLVLILQILSALDFDPYRVLGVSRTASQADIKKAYKKLAREWHPDKNKDPGAEDKFIQISKAYEILSNEEKRSNYDQYGDAGENQGYQKQQQQREYRFRHFHENFYFDESFFHFPFNSERRDSIDEKYLLHFSHYVNEVVPDSFKKPYLIKITSDWCFSCIHIEPVWKEVIQELEELGVGIGVVHAGYERRLAHHLGAHSTPSILGIINGKISFFHNAVVRENLRQFVESLLPGNLVEKVTNKNYVRFLSGWQQENKPHVLLFDQTPIVPLLYKLTAFAYKDYLSFGYVYVGLRGTEEMTRRYNINIYAPTLLVFKEHINRPADVIQARGMKKQIIDDFITRNKYLLAARLTSQKLFHELCPVKRSHRQRKYCVVLLTAETTKLSKPFEAFLSFALANTQDTVRFVHVYSNRQQEFADTLLPDSEAFQGKSAVSILERRNTAGRVVYKTLEDPWIGSESDKFILLGYLDQLRKDPALLSSEAVLPDLTDELAPVFLLRWFYSASDYISDCWDSIFHNNWREMMPLLSLIFSALFILFGTVIVQAFSDSNDERESSPPEKEEAQEKTGKTEPSFTKENSSKIPKKGFVEVTELTDVTYTSNLVRLRPGHMNVVLILSNSTKTSLLQKFALEVYTFTGSSCLHFSFLSLDKHREWLEYLLEFAQDAAPIPNQYDKHFMERDYTGYVLALNGHKKYFCLFKPQKTVEEEEAIGSCSDVDSSLYLGESRGKPSCGLGSRPIKGKLSKLSLWMERLLEGSLQRFYIPSWPELD

SEQ ID NO: 70024 - protein, 12 aa, Homo sapiens
LLLLILRLLRIL

SEQ ID NO: 70025 - protein, 79 aa, Homo sapiens
LLLIAFIFLIIKSYRKYHSKPQAPDPHSDPPAKLSSIPGESLTYASTTFKLSEEKSNHLAENHSADFDPIVYAQIKVTN

SEQ ID NO: 70026 - protein, 290 aa, Homo sapiens
LIIFSHGLGAFRTLYSAFCMELASRGFVVAVPEHRDRSAATTYFCKQAPEENQPTNESLQEEWIPFRRVEEGEKEFHVRNPQVHQRVSECLRVLKILQEVTAGQTVFNILPGGLDLMTLKGNIDMSRVAVMGHSFGGATAILALAKETQFRCAVALDAWMFPLERDFYPKARGPVFFINTEKFQTMESVNLMKKICAQHEQSRIITVLGSVHRSQTDFAFVTGNLIGKFFSTETRGSLDPYEGQEVMVRAMLAFLQKHLDLKEDYNQWNNLIEGIGPSLTPGAPHHLSSL

SEQ ID NO: 70027 - protein, 17 aa, Homo sapiens
LIQAILEGCWLLMLLLS

SEQ ID NO: 70028 - protein, 156 aa, Homo sapiens
LPFPVLLLAALPPVLLPGAAGFTPSLDSDFTFTLPAGQKECFYQPMPLKASLEIEYQVLDGAGLDIDFHLASPEGKTLVFEQRKSDGVHTVETEVGDYMFCFDNTFSTISEKVIFFELILDNMGEQAQEQEDWKKYITGTDILDMKLEDILVSMVF

SEQ ID NO: 70029 - protein, 52 aa, Homo sapiens
LSDQRMHLLLLPVIFLPWVLPQHKHTSATPGFSSEKQFMSETENQTANVKFY

SEQ ID NO: 70030 - protein, 18 aa, Homo sapiens
LFIMLSALFSKLASALDS

SEQ ID NO: 70031 - protein, 8 aa, Homo sapiens
KKVIFLVF

SEQ ID NO: 70032 - protein, 86 aa, Homo sapiens
IQLKHYILALAALHCSSVLLVEIWILRREHSTALSSQENSRCKKLQCINCREESTVLQAERATTALLFNEREKMKERENFRRLGPI

SEQ ID NO: 70033 - protein, 98 aa, Homo sapiens
LSAGNGFWILVFLGSYYNSSERALAPLRDPPRRVGIFLDYEAGHLSFYSATDGSLLFIFPEIPFSGTLRPLFSPLSSSPTPMTICRPKGGSGDTLAPQ

SEQ ID NO: 70034 - protein, 10 aa, Homo sapiens
VLGAMLLLVP

SEQ ID NO: 70035 - protein, 46 aa, Homo sapiens
LYFLLFSLLVKTRMKTSMMSHLHLMTVSHWPATCSSLCLPDYNNSM

SEQ ID NO: 70036 - protein, 334 aa, Homo sapiens
LVPLFCWLRATFWLLATKRRKQQLVLRGPDETKEEEEDPPLPTTPTSVNYHFTRQCNYKCGFCFHTAKTSFVLPLEEAKRGLLLLKEAGMEKINFSGGEPFLQDRGEYLGKLVRFCKVELRLPSVSIVSNGSLIRERWFQNYGEYLDILAISCDSFDEEVNVLIGRGQGKKNHVENLQKLRRWCRDYRVAFKINSVINRFNVEEDMTEQIKALNPVRWKVFQCLLIEGENCGEDALREAERFVIGDEEFERFLERHKEVSCLVPESNQKMKDSYLILDEYMRFLNCRKGRKDPSKSILDVGVEEAIKFSGFDEKMFLKRGGKYIWSKADLKLDW

SEQ ID NO: 70037 - protein, 9 aa, Homo sapiens
MYLFMLNFL

SEQ ID NO: 70038 - protein, 16 aa, Homo sapiens
ICTVKVMMLICFQLFL

SEQ ID NO: 70039 - protein, 25 aa, Homo sapiens
LLLFLAIFIYAFPNYAAMKLVKPFS

SEQ ID NO: 70040 - protein, 22 aa, Homo sapiens
VSLFLLVVLYHYVAVNNPKKQE

SEQ ID NO: 70041 - protein, 15 aa, Homo sapiens
KKLDKGFLHLFLFFF

SEQ ID NO: 70042 - protein, 41 aa, Homo sapiens
LKAASWGLFVITALQRFKGGDGACAGLSSHPSEELMFTGYA

SEQ ID NO: 70043 - protein, 11 aa, Homo sapiens
LLAGFLLCIWH

SEQ ID NO: 70044 - protein, 31 aa, Homo sapiens
IPYRRSLIIFLIYLQGSVCQMCATLLISHQR

SEQ ID NO: 70045 - protein, 26 aa, Homo sapiens
RFLTLYVYVFALGGGGTVLVDSCGLM

SEQ ID NO: 70046 - protein, 9 aa, Homo sapiens
TGLMVVLLC

SEQ ID NO: 70047 - protein, 23 aa, Homo sapiens
MIWIFCLPHPWTQLLICVMDVVL

SEQ ID NO: 70048 - protein, 13 aa, Homo sapiens
MPLLQIFLFATVT

SEQ ID NO: 70049 - protein, 11 aa, Homo sapiens
MISLVFLYHSF

SEQ ID NO: 70050 - protein, 40 aa, Homo sapiens
ILITAPIGSLLIGLLGPRLLQKVEHQNKDEEVQGETSVQV

SEQ ID NO: 70051 - protein, 87 aa, Homo sapiens
IALAVILCATVVQGFPMFKRGRCLCIGPGVKAVKVADIEKASIMYPSNNCDKIEVIITLKENKGQRCLNPKSKQARLIIKKVERKNF

SEQ ID NO: 70052 - protein, 12 aa, Homo sapiens
ILLRFNACFFFL

SEQ ID NO: 70053 - protein, 28 aa, Homo sapiens
RLFHWLTFRLLTLLPTIEKRRDSMRLEM

SEQ ID NO: 70054 - protein, 17 aa, Homo sapiens
ILFNYIVSGLVLILEKL

SEQ ID NO: 70055 - protein, 162 aa, Homo sapiens
IVTANRHLLMGLTSQLLPPLFFLLACAGNFVHGHKCDITLQEIIKTLNSLTEQKTLCTELTVTDIFAASKNTTEKETFCRAATVLRQFYSHHEKDTRCLGATAQQFHRHKQLIRFLKRLDRNLWGLAGLNSCPVKEANQSTLENFLERLKTIMREKYSKCSS

SEQ ID NO: 70056 - protein, 13 aa, Homo sapiens
ITNISFCGAMLTF

SEQ ID NO: 70057 - protein, 28 aa, Homo sapiens
LEWILRVGFAAFSVLWACCSRICGAKQP

SEQ ID NO: 70058 - protein, 457 aa, Homo sapiens
VGLLTWATLGLLVAGLGGHDDLHDDLQEDFHGHSHRHSHEDFHHGHSHAHGHGHTHESIWHGHTHDHDHGHSHEDLHHGHSHGYSHESLYHRGHGHDHEHSHGGYGESGAPGIKQDLDAVTLWAYALGATVLISAAPFFVLFLIPVESNSPRHRSLLQILLSFASGGLLGDAFLHLIPHALEPHSHHTLEQPGHGHSHSGQGPILSVGLWVLSGIVAFLVVEKFVRHVKGGHGHSHGHGHAHSHTRGSHGHGRQERSTKEKQSSEEEEKETRGVQKRRGGSTVPKDGPVRPQNAEEEKRGLDLRVSGYLNLAADLAHNFTDGLAIGASFRGGRGLGILTTMTVLLHEVPHEVGDFAILVQSGCSKKQAMRLQLLTAVGALAGTACALLTEGGAVGSEIAGGAGPGWVLPFTAGGFIYVATVSVLPELLREASPLQSLLEVLGLLGGVIMMVLIAHLE

SEQ ID NO: 70059 - protein, 20 aa, Homo sapiens
LSWRVTMKIILLSSGMPLLL

SEQ ID NO: 70060 - protein, 236 aa, Homo sapiens
LAVIHEAPAVLLCCLALLPQEVLDIQNNLYQTALHLAVHLDQPGAVRALVLKGASRALQDRHGDTALHVACQRQHLACARCLLEGRPEPGRGTSHSLDLQLQNWQGLACLHIATLQKNQPLMELLLRNGADIDVQEGTSGKTALHLAVETQERGLVQFLLQAGAQVDARMLNGCTPLHLAAGRGLMGISSTLCKAGADSLLRNVEDETPQDLTEESLVLLPFDDLKISGKLLLCTD

SEQ ID NO: 70061 - protein, 324 aa, Homo sapiens
RCSLPPWLPLGLLLWSGLALGALPFGSSPHRVFHDLLSEQQLLEVEDLSLSLLQGGGLGPLSLPPDLPDLDPECRELLLDFANSSAELTGCLVRSARPVRLCQTCYPLFQQVVSKMDNISRAAGNTSESQSCARSLLMADRMQIVVILSEFFNTTWQEANCANCLTNNSEELSNSTVYFLNLFNHTLTCFEHNLQGNAHSLLQTKNYSEVCKNCREAYKTLSSLYSEMQKMNELENKAEPGTHLCIDVEDAMNITRKLWSRTFNCSVPCSDTVPVIAVSVFILFLPVVFYLSSFLHSEQKKRKLILPKRLKSSTSFANIQENSN

SEQ ID NO: 70062 - protein, 10 aa, Homo sapiens
IILCFILPGI

SEQ ID NO: 70063 - protein, 6 aa, Homo sapiens
LIGLFL

SEQ ID NO: 70064 - protein, 14 aa, Homo sapiens
LLLINIYMYLCTSS

SEQ ID NO: 70065 - protein, 32 aa, Homo sapiens
LFTVPLWISSVGIWNTGMMEMCSLQSSSTEEP

SEQ ID NO: 70066 - protein, 714 aa, Homo sapiens
LKKKAKMKDMPLRIHVLLGLAITTLVQAVDKKVDCPRLCTCEIRPWFTPRSIYMEASTVDCNDLGLLTFPARLPANTQILLLQTNNIAKIEYSTDFPVNLTGLDLSQNNLSSVTNINVKKMPQLLSVYLEENKLTELPEKCLSELSNLQELYINHNLLSTISPGAFIGLHNLLRLHLNSNRLQMINSKWFDALPNLEILMIGENPIIRIKDMNFKPLINLRSLVIAGINLTEIPDNALVGLENLESISFYDNRLIKVPHVALQKVVNLKFLDLNKNPINRIRRGDFSNMLHLKELGINNMPELISIDSLAVDNLPDLRKIEATNNPRLSYIHPNAFFRLPKLESLMLNSNALSALYHGTIESLPNLKEISIHSNPIRCDCVIRWMNMNKTNIRFMEPDSLFCVDPPEFQGQNVRQVHFRDMMEICLPLIAPESFPSNLNVEAGSYVSFHCRATAEPQPEIYWITPSGQKLLPNTLTDKFYVHSEGTLDINGVTPKEGGLYTCIATNLVGADLKSVMIKVDGSFPQDNNGSLNIKIRDIQANSVLVSWKASSKILKSSVKWTAFVKTENSHAAQSARIPSDVKVYNLTHLNPSTEYKICIDIPTIYQKNRKKCVNVTTKGLHPDQKEYEKNNTTTLMACLGGLLGIIGVICLISCLSPEMNCDGGHSYVRNYLQKPTFALGELYPPLINLWEAGKEKSTSLKVKATVIGLPTNMS

SEQ ID NO: 70067 - protein, 14 aa, Homo sapiens
KDGCCVLFIFFLLL

SEQ ID NO: 70068 - protein, 112 aa, Homo sapiens
VMLFLALGSPWAVELPLCGRRTALCAAAALRGPRASVSRASSSSGPSGPVAGWSTGPSGAARLLRRPGRAQIPVYWEGYVRFLNTPSDKSEDGRLIYTGNMARAVFGWSAVA

SEQ ID NO: 70069 - protein, 12 aa, Homo sapiens
LMGFVFWLIFMN

SEQ ID NO: 70070 - protein, 15 aa, Homo sapiens
LVVLFIFCLFMTIQL

SEQ ID NO: 70071 - protein, 311 aa, Homo sapiens
MAYHLLFAMFVWSYWKTIFTLPMNPSKEFHLSYAEKDLLEREPRGEAHQEVLRRAAKDLPIYTRTMSGAIRYCDRCQLIKPDRCHHCSVCDKCILKMDHHCPWVNNCVGFSNYKFFLLFLAYSLLYCLFIAATDLQYFIKFWTNGLPDTQAKFHIMFLFFAAAMFSVSLSSLFGYHCWLVSKNKSTLEAFRSPVFRHGTDKNGFSLGFSKNMRQVFGDEKKYWLLPIFSSLGDGCSFPTCLVNQDPEQASTPAGLNSTAKNLENHQFPAKPLRESQSHLLTDSQSWTESSINPGKCKAGMSNPALTMENET

SEQ ID NO: 70072 - protein, 11 aa, Homo sapiens
ITSLSMLLLIL

SEQ ID NO: 70073 - protein, 15 aa, Homo sapiens
LTPLMDLSLLLFMDL

SEQ ID NO: 70074 - protein, 14 aa, Homo sapiens
IYLLYCANFSMYVM

SEQ ID NO: 70075 - protein, 18 aa, Homo sapiens
IVALPLLQFYGVCVWLSN

SEQ ID NO: 70076 - protein, 837 aa, Homo sapiens
LSEVRAALGLALYLIALRTLVQLSLQQLVLRGAAGHRGEFDALQARDYLEHITSIGPRTTGSPENEILTVHYLLEQIKLIEVQSNSLHKISVDVQRPTGSFSIDFLGGFTSYYDNITNVVVKLEPRDGAQHAVLANCHFDSVANSPGASDDAVSCSVMLEVLRVLSTSSEALHHAVIFLFNGAEENVLQASHGFITQHPWASLIRAFINLEAAGVGGKELVFQTGPENPWLVQAYVSAAKHPFASVVAQEVFQSGIIPSDTDFRIYRDFGNIPGIDLAFIENGYIYHTKYDTADRILTDSIQRAGDNILAVLKHLATSDMLAAASKYRHGNMVFFDVLGLFVIAYPSRIGSIINYMVVMGVVLYLGKKFLQPKHKTGNYKKDFLCGLGITLISWFTSLVTVLIIAVFISLIGQSLSWYNHFYVSVCLYGTATVAKIILIHTLAKRFYYMNASAQYLGEVFFDISLFVHCCFLVTLTYQGLCSAFISAVWVAFPLLTKLCVHKDFKQHGAQGKFIAFYLLGMFIPYLYALYLIWAVFEMFTPILGRSGSEIPPDVVLASILAGCTMILSSYFINFIYLAKSTKKTMLTLTLVCAITFLLVCSGTFFPYSSNPANPKPKRVFLQHMTRTFHDLEGNAVKRDSGIWINGFDYTGISHITPHIPEINDSIRAHCEENAPLCGFPWYLPVHFLIRKNWYLPAPEVSPRNPPHFRLISKEQTPWDSIKLTFEATGPSHMSFYVRAHKGSTLSQWSLGNGTPVTSKGGDYFVFYSHGLQASAWQFWIEVQVSEEHPEGMVTVAIAAHYLSGEDKRSPQLDALKEKFPDWTFPSAWVCTYDLFVF

SEQ ID NO: 70077 - protein, 48 aa, Homo sapiens
IILYILYMMTSVSSDHCRGAREKPQISAAQSTQPQKQVVQLYRPLDTS

SEQ ID NO: 70078 - protein, 1126 aa, Homo sapiens
IILYILYMMTSVSSDHCRGAREKPQISAAQSTQPQKQVVQATAEQMRLAQVIFDKNDSDFEAKVKQLMEVTGKNQDECIVALHDCNGDVNKAINILLEGNSDTTSWETVGCKKKNFAKENSENKENREKKSEKESSRGRGNNNRKGRGGNRGREFRGEENGIDCNQVDKPSDRGKRARGRGFGRGRGRGAGRFSTQGMGTFNPADYSDSTSTDVCGTKLVVWEAAQNGADEGTELASNTHNIAQDLSNKSSYGLKGAWKNSVEEWTTEDWTEDLSETKVFTASSAPAENHILPGQSIDLVALLQKPVPHSQASEANSFETSQQQGFGQALVFTNSQHNNQMAPGTGSSTAVNSCSPQSLSSVLGSGFGELAPPKMANITSSQILDQLKAPSLGQFTTTPSTQQNSTSHPTTTTSWDLKPPTSQSSVLSHLDFKSQPEPSPVLSQLSQRQQHQSQAVTVPPPGLESFPSQAKLRESTPGDSPSTVNKLLQLPSTTIENISVSVHQPQPKHIKLAKRRIPPASKIPASAVEMPGSADVTGLNVQFGALEFGSEPSLSEFGSAPSSENSNQIPISLYSKSLSEPLNTSLSMTSAVQNSTYTTSVITSCSLTSSSLNSASPVAMSSSYDQSSVHNRIPYQSPVSSSESAPGTIMNGHGGGRSQQTLDTPKTTGPPSALPSVSSLPSTTSCTALLPSTSQHTGDLTSSPLSQLSSSLSSHQSSLSAHAALSSSTSHTHASVESASSHQSSATFSTAATSVSSSASSGASLSSSMNTANSLCLGGTPASASSSSSRAAPLVTSGKAPPNLPQGVPPLLHNQYLVGPGGLLPAYPIYGYDELQMLQSRLPVDYYGIPFAAPTALASRDGSLANNPYPGDVTKFGRGDSASPAPATTPAQPQQSQSQTHHTAQQPFVNPALPPGYSYTGLPYYTGMPSAFQYGPTMFVPPASAKQHGVNLSTPTPPFQQASGYGQHGYSTGYDDLTQGTAAGDYSKGGYAGSSQAPNKSAGSGPGKGVSVSSSTTGLPDMTGSVYNKTQTFDKQGFHAGTPPPFSLPSVLGSTGPLASGAAPGYAPPPFLHILPAHQQPHSQLLHHHLPQDAQSGSGQRSQPSSLQPKSQASKPAYGNSPYWTN

SEQ ID NO: 70079 - protein, 54 aa, Homo sapiens
KFLWWQKAFSQRMEVAALLVFRTCWIRSLCVWPQPLETSYSAVSAHNSWSVLGV

SEQ ID NO: 70080 - protein, 83 aa, Homo sapiens
LLLSLFSLVASLLLVSHLYLVASNTTTWEFISSHRIAYLRQRPSNPFDRGLTRNLAHFFCGWPSGSWETLWAEEEEEGSSPAV

SEQ ID NO: 70081 - protein, 35 aa, Homo sapiens
LMRKLNLPQVTWLLPLVTCQLTRSELLLLLCHREW

SEQ ID NO: 70082 - protein, 28 aa, Homo sapiens
RSSFSRLTWWVSLCRALLALGEPRSVET

SEQ ID NO: 70083 - protein, 17 aa, Homo sapiens
VSACRFFLCLFSALPRP

SEQ ID NO: 70084 - protein, 45 aa, Homo sapiens
LLVRVLVSDSLFVICALSLAACLCLVARRAPSTSIYLEAKVGLQH

SEQ ID NO: 70085 - protein, 7 aa, Homo sapiens
RVFMFLF

SEQ ID NO: 70086 - protein, 19 aa, Homo sapiens
IVFLVLSFLRIKLETFDGK

SEQ ID NO: 70087 - protein, 449 aa, Homo sapiens
IGSTVYSKHWLFGVLSGLIQIVSPENTKSSSDDEEQLTELDEEMENEICRVWDMSMDEDVALFLQEFNAPDIFMGVLAKSKCPRLREICVGILGNMACFQEICVSISSDKNLGQVLLHCLYDSDPPTLLETSRLLLTCLSQAEVASVWVERIQEHPAIYDSICFIMSSSTNVDLLVKVGEVVDKLFDLDEKLMLEWVRNGAAQPLDQPQEESEEQPVFRLVPCILEAAKQVRSENPEWLDVYMHILQLLTTVDDGIQAIVHCPDTGKDIWNLLFDLVCHEFCQSDDPPIILQEQKTVLASVFSVLSAIYASQTEQEYLKIEKVDLPLIDSLIRVLQNMEQCQKKPENSAESNTEETKRTDLTQDDFHLKILKDILCEFLSNIFQALTKETVAQGVKEGQLSKQKCSSAFQNLLPFYSPVVEDFIKILREVDKALADDLEKNFPSLKVQT

SEQ ID NO: 70088 - protein, 38 aa, Homo sapiens
LENLFFSAVLLGWGSLLIILKNEGFYSSTCPAVPGVMC

SEQ ID NO: 70089 - protein, 199 aa, Homo sapiens
TLAELLVLLAALLATVSGYFVSIDAHAEECFFERVTSGTKMGLIFEVAEGGFLDIDVEITGPDNKGIYKGDRESSGKYTFAAHMDGTYKFCFSNRMSTMTPKIVMFTIDIGEAPKGQDMETEAHQNKLEEMINELAVAMTAVKHEQEYMEVRERIHRAINDNTNSRVVLWSFFEALVLVAMTLGQIYYLKRFFEVRRVV

SEQ ID NO: 70090 - protein, 160 aa, Homo sapiens
IVLMATVLKTIVLIPFLEQNNFSPNTRTQKARHCGHCPEEWITYSNSCYYIGKERRTWEESLQACASKNSSSLLCIDNEEEMKFLASILPSSWIGVFRNSSHHPWVTINGLAFKHEIKDSDHAERNCAMLHVRGLISDQCGSSRIIRRGFIMLTRLVLNS

SEQ ID NO: 70091 - protein, 177 aa, Homo sapiens
IVLMATVLKTIVLIPFLEQNNSSPNARTQKARHCGHCPEEWITYSNSCYYIGKERRTWEESLQACASKNSSSLLCIDNEEEMKFLASILPSSWIGVFRNSSHHPWVTINGLAFKHEIKDSDHAERNCAMLHVRGLISDQCGSSRIIVSISFRIKALELAVHQIKFYICSNRNDIMIA

SEQ ID NO: 70092 - protein, 61 aa, Homo sapiens
LKMFAASLLAMCAGAEVVHRYYRPDLTIPEIPPKRGELKTELLGLKERKHKPQVSQQEELK

SEQ ID NO: 70093 - protein, 14 aa, Homo sapiens
RPVLMIFGFFSLSC

SEQ ID NO: 70094 - protein, 17 aa, Homo sapiens
VTVILMAFCVYKPIRRR

SEQ ID NO: 70095 - protein, 50 aa, Homo sapiens
MRKFTILKGSMLFSISLYLISDLKLLMQFMNLRKKNVNGNQMKKMRFRRN

SEQ ID NO: 70096 - protein, 21 aa, Homo sapiens
KMDPQRRFLVASLVAGVCIET

SEQ ID NO: 70097 - protein, 764 aa, Homo sapiens
LGAPLFKAWLLISVWGLGVDPSLQIDVLTELELGESTTGVRQVPGLHNGTKAFLFQDTPRSIKASTATAEQFFQKLRNKHEFTILVTLKQTHLNSGVILSIHHLDHRYLELESSGHRNEVRLHYRSGSHRPHTEVFPYILADDKWHKLSLAISASHLILHIDCNKIYERVVEKPSTDLPLGTTFWLGQRNNAHGYFKGIMQDVQLLVMPQGFIAQCPDLNRTCPTCNDFHGLVQKIMELQDILAKTSAKLSRAEQRMNRLDQCYCERTCTMKGTTYREFESWIDGCKNCTCLNGTIQCETLICPNPDCPLKSALAYVDGKCCKECKSICQFQGRTYFEGERNTVYSSSGVCVLYECKDQTMKLVESSGCPALDCPESHQITLSHSCCKVCKGYDFCSERHNCMENSICRNLNDRAVCSCRDGFRALREDNAYCEDIDECAEGRHYCRENTMCVNTPGSFMCICKTGYIRIDDYSCTEHDECITNQHNCDENALCFNTVGGHNCVCKPGYTGNGTTCKAFCKDGCRNGGACIAANVCACPQGFTGPSCETDIDECGTGRHSCANDTICFNLDGGYDCRCPHGKNCTGDCIHDGKVKHNGQIWVLENDRCSVCSCQNGFVMCRRMVCDCENPTVDLFCCPECDPRLSSQCLHQNGETLYNSGDTWVQNCQQCRCLQGEVDCWPLPCPDVECEFSILPENECCPRCVTDPCQADTIRNDITKTCLDEMNVVRFTGSSWIKHGTECTLCQCKNGHICCSVDPQCLQEL

SEQ ID NO: 70098 - protein, 7 aa, Homo sapiens
LINLLLL

SEQ ID NO: 70099 - protein, 41 aa, Homo sapiens
KYLNICLFLTGLMLHKFAATGTRWTAARNQLKQLVIYYRNL

SEQ ID NO: 70100 - protein, 13 aa, Homo sapiens
LGKIVTSLVIFII

SEQ ID NO: 70101 - protein, 7 aa, Homo sapiens
MFFAFYF

SEQ ID NO: 70102 - protein, 21 aa, Homo sapiens
MEVVLRHLMLVPVLQLFISTL

SEQ ID NO: 70103 - protein, 163 aa, Homo sapiens
THPTAFPATIMFAMKCLSLLKFLMDLGCDGEPCFSCLYGNGPHPPAPQPSSRFNDAPAADKEPSVVQFCEFVSAPEVSRWAGPIIDVLLDYVGNVQLCSRLKEHIDSFEDWAVIKEKAEPPRPLAHLCRLRVRKAIGKYRIKLLDTLPLPGRLIRYLKYENTQ

SEQ ID NO: 70104 - protein, 501 aa, Homo sapiens
LWLGLVKLGCAMACLNYNIRAKSLLHCFQCCGAKVLLVSPELQAAVEEILPSLKKDDVSIYYVSRTSNTDGIDSFLDKVDEVSTEPIPESWRSEVTFSTPALYIYTSGTTGLPKAAMITHQRIWYGTGLTFVSGLKADDVIYITLPFYHSAALLIGIHGCIVAGATLALRTKFSASQFWDDCRKYNVTVIQYIGELLRYLCNSPQKPNDRDHKVRLALGNGLRGDVWRQFVKRFGDICIYEFYAATEGNIGFMNYARKVGAVGRVNYLQKKIITYDLIKYDVEKDEPVRDENGYCVRVPKGEVGLLVCKITQLTPFNGYAGAKAQTEKKKLRDVFKKGDLYFNSGDLLMVDHENFIYFHDRVGDTFRWKGENVATTEVADTVGLVDFVQEVNVYGVHVPDHEGRIGMASIKMKENHEFDGKKLFQHIADYLPSYARPRFLRIQDTIEITGTFKHRKMTLVEEGFNPAVIKDALYFLDDTAKMYVPMTEDIYNAISAKTLKL

SEQ ID NO: 70105 - protein, 11 aa, Homo sapiens
IFSVYMCSIYF

SEQ ID NO: 70106 - protein, 24 aa, Homo sapiens
IFITLLGLLGYLHFVKIDQETVNH

SEQ ID NO: 70107 - protein, 70 aa, Homo sapiens
IVLVFVTVFLVLQLRSGFSFRGVKVYTMDRGLISYKGLPPEAWQEECPSDSEEDEGRGERTAFIKDQSAL

SEQ ID NO: 70108 - protein, 175 aa, Homo sapiens
RGLRALCRVLLFLSQFCILSGGESTEIPPYVMKCPSNGLCSRLPADCIDCTTNFSCTYGKPVTFDCAVKPSVTCVDQDFKSQKNFIINMTCRFCWQLPETDYECTNSTSCMTVSCPRQRYPANCTVRDHVHCLGNRTFPKMLYCNWTGGYKWSTALALSLQAQVGLHVQLTVGLH

SEQ ID NO: 70109 - protein, 66 aa, Homo sapiens
LALAVGCVFLLEPELPGSALRSLWSSLCLGPAPAPPGPVSPEGRLAAAWDALIVRPVRRWRRVAVG

SEQ ID NO: 70110 - protein, 51 aa, Homo sapiens
IKGMTANLAVLVAFIILEKKPTFEVQFNLNDVLASSEELFLKVHKKATSRL

SEQ ID NO: 70111 - protein, 53 aa, Homo sapiens
LPLSCFLVALIIWCYLREESEADQWLRQVWGEVPEPSDRSEEPETPAAYRART

SEQ ID NO: 70112 - protein, 56 aa, Homo sapiens
ILTSGTIAIWDLLLGQCTALLPPVSDQHWSFVKWSGTDSHLLAGQKDGNIFVYHYS

SEQ ID NO: 70113 - protein, 21 aa, Homo sapiens
IFWLLVGFICERIIFPCVEDT

SEQ ID NO: 70114 - protein, 28 aa, Homo sapiens
IWPVQLVYLMPMFLLRVMHAYHLFQRRD

SEQ ID NO: 70115 - protein, 10 aa, Homo sapiens
MWIQTFLSVL

SEQ ID NO: 70116 - protein, 28 aa, Homo sapiens
IHFIFITMGRILLLSSLGQTSEDFSDGS

SEQ ID NO: 70117 - protein, 19 aa, Homo sapiens
LTFSSLASFPLSVLVLLTS

SEQ ID NO: 70118 - protein, 62 aa, Homo sapiens
VVLLLQGLSLLELLDFPPLFWVLDAHAIWHISTIPVHVLFFSFLEDDSLYLLKESEDKFKLD

SEQ ID NO: 70119 - protein, 33 aa, Homo sapiens
IPFQSLSSMMSWAWVAWKWSLIMLKMLPNGAVS

SEQ ID NO: 70120 - protein, 25 aa, Homo sapiens
MMSWAWVAWKWSLIMLKMLPNGAVS

SEQ ID NO: 70121 - protein, 243 aa, Homo sapiens
VGNMAGPPRLLLLPLLLALARGLPGALAAQEVQQSPHCTTVPVGASVNITCSTSGGLRGIYLRQLGPQPQDIIYYEDGVVPTTDRRFRGRIDFSGSQDNLTITMHRLQLSDTGTYTCQAITEVNVYGSGTLVLVTEEQSQGWHRCSDAPPRASALPAPPTGSALPDPQTASALPDPPAASALPAALAVISFLLGLGLGVACVLARTQIKKLCSWRDKNSAACVVYEDMSHSRCNTLSSPNQYQ

SEQ ID NO: 70122 - protein, 44 aa, Homo sapiens
RRFESPLLWQSAIMILTMLLMLKLCTEVRVANELNARRRSFTVL

SEQ ID NO: 70123 - protein, 466 aa, Homo sapiens
LHSQLLQLSRASMAAWKSWTALRLCATVVVLDMVVCKGFVEDLDESFKENRNDDIWLVDFYAPWCGHCKKLEPIWNEVGLEMKSIGSPVKVGKMDATSYSSIASEFGVRGYPTIKLLKGDLAYNYRGPRTKDDIIEFAHRVSGALIRPLPSQQMFEHMQKRHRVFFVYVGGESPLKEKYIDAASELIVYTYFFSASEEVVPEYVTLKEMPAVLVFKDETYFVYDEYEDGDLSSWINRERFQNYLAMDGFLLYELGDTGKLVALAVIDEKNTSVEHTRLKSIIQEVARDYRDLFHRDFQFGHMDGNDYINTLLMDELTVPTVVVLNTSNQQYFLLDRQIKNVEDMVQFINNILDGTVEAQGGDSILQRLKRIVFDAKSTIVSIFKSSPLMGCFLFGLPLGVISIMCYGIYTADTDGGYIEERYEVSKSENENQEQIEESKEQQEPSSGGSVVPTVQEPKDVLEKKKD

SEQ ID NO: 70124 - protein, 33 aa, Homo sapiens
IMAIFFFFCIIVSSLPTAELGTENACSTCLLNE

SEQ ID NO: 70125 - protein, 11 aa, Homo sapiens
IKRLLLFVYLD

SEQ ID NO: 70126 - protein, 15 aa, Homo sapiens
IVAQTLLSIKVFMLV

SEQ ID NO: 70127 - protein, 15 aa, Homo sapiens
IWSLAASFLEFITLL

SEQ ID NO: 70128 - protein, 17 aa, Homo sapiens
MWLFFFDQFQFIYLNLL

SEQ ID NO: 70129 - protein, 20 aa, Homo sapiens
MKSQAHYCLVLMSLVLKILE

SEQ ID NO: 70130 - protein, 14 aa, Homo sapiens
LKLCSNFLSTILAV

SEQ ID NO: 70131 - protein, 11 aa, Homo sapiens
MVMMMITMIIL

SEQ ID NO: 70132 - protein, 769 aa, Homo sapiens
LPGLALLLLAAWTARALEVPTDGNAGLLAEPQIAMFCGRLNMHMNVQNGKWDSDPSGTKTCIDTKEGILQYCQEVYPELQITNVVEANQPVTIQNWCKRGRKQCKTHPHFVIPYRCLVGEFVSDALLVPDKCKFLHQERMDVCETHLHWHTVAKETCSEKSTNLHDYGMLLPCGIDKFRGVEFVCCPLAEESDNVDSADAEEDDSDVWWGGADTDYADGSEDKVVEVAEEEEVAEVEEEEADDDEDDEDGDEVEEEAEEPYEEATERTTSIATTTTTTTESVEEVVREVCSEQAETGPCRAMISRWYFDVTEGKCAPFFYGGCGGNRNNFDTEEYCMAVCGSAMSQSLLKTTQEPLARDPVKLPTTAASTPDAVDKYLETPGDENEHAHFQKAKERLEAKHRERMSQVMREWEEAERQAKNLPKADKKAVIQHFQEKVESLEQEAANERQQLVETHMARVEAMLNDRRRLALENYITALQAVPPRPRHVFNMLKKYVRAEQKDRQHTLKHFEHVRMVDPKKAAQIRSQVMTHLRVIYERMNQSLSLLYNVPAVAEEIQDEVDELLQKEQNYSDDVLANMISEPRISYGNDALMPSLTETKTTVELLPVNGEFSLDDLQPWHSFGADSVPANTENEVEPVDARPAADRGLTTRPGSGLTNIKTEEISEVKMDAEFRHDSGYEVHHQKLVFFAEDVGSNKGAIIGLMVGGVVIATVIVITLVMLKKKQYTSIHHGVVEVDAAVTPEERHLSKMQQNGYENPTYKFFEQMQN

SEQ ID NO: 70133 - protein, 47 aa, Homo sapiens
RTSTFALTIIVGVMFFERAFDQGADAIYDHINEGKLWKHIKHKYENK

SEQ ID NO: 70134 - protein, 7 aa, Homo sapiens
ILFFILI

SEQ ID NO: 70135 - protein, 10 aa, Homo sapiens
MAVIMGIVLL

SEQ ID NO: 70136 - protein, 272 aa, Homo sapiens
ITCKTKEARMLLAWVQAFLVSNMLLAEAYGSGGCFWDNGHLYREDQTSPAPGLRCLNWLDAQSGLASAPVSGAGNHSYCRNPDEDPRGPWCYVSGEAGVPEKRPCEDLRCPETTSQALPAFTTEIQEASEGPGADEVQVFAPANALPARSEAAAVQPVIGISQRVRMNSKEKKDLGTLGYVLGITMMVIIIAIGAGIILGYSYKRGKDLKEQHDQKVCEREMQRITLPLSAFTNPTCEIVDEKTVVVHTSQTPVDPQEGTTPLMGQAGTPGA

SEQ ID NO: 70137 - protein, 39 aa, Homo sapiens
LTLPTVWLGVASLVWELLSALWRYMAQEAGRGHRCAGPA

SEQ ID NO: 70138 - protein, 36 aa, Homo sapiens
MAALPLSWLSLGLSLWTLPKHDFRFKAKALMPVSKR

SEQ ID NO: 70139 - protein, 56 aa, Homo sapiens
IKICLLLILMLPAQQVHQRARMNYGCHECPCEAVGKPWLDCEGYLKSILESTRSSM

SEQ ID NO: 70140 - protein, 14 aa, Homo sapiens
MIFILFSGYTQTLL

SEQ ID NO: 70141 - protein, 137 aa, Homo sapiens
MKYLFFSWLVVFVGSWIIYVQYSTYTELCRGKDCKKIICDKYKTGVIDGPACNSLCVTETLYFGKCLSTKPNNQMYLGIWDNLPGVVKCQMEQALHLDFGTELEPRKEIVLFDKPTRGTTVQKFKEMVYSLFKDQHR

SEQ ID NO: 70142 - protein, 87 aa, Homo sapiens
MRLLSFVVLALFAVTQAEEGARLLASKSLLNRYAVEGRDLTLQYNIYNVGSSAALDVELSDDSFPPEDFGIVSGMLNVKWDRIAPQC

SEQ ID NO: 70143 - protein, 17 aa, Homo sapiens
MLYVSWFLGIFDTYSVL

SEQ ID NO: 70144 - protein, 195 aa, Homo sapiens
MTAAAGSAGRAAVPLLLCALLAPGGAYVLDDSDGLGREFDGIGAVSGGGATSRLLVNYPEPYRSQILDYLFKPNFGASLHILKVEIGGDGQTTDGTEPSHMHYALDENYFRGYEWWLMKEAKKRNPNITLIGLPWSFPGWLGKGFDWPYVNLQLTAYYVVTWIVGAKRYHDLDIDYIGIWNERSYNANYIKVFGE

SEQ ID NO: 70145 - protein, 99 aa, Homo sapiens
MAQVGAWRTGALGLALLLLLGLGLGLEAAASPLSTPTSAQAAGPSSGSCPPTKFQCRTSGLCVPLTWRCDRDLDCSDGSDEEECSEWPRPLAGLTGGGA

SEQ ID NO: 70146 - protein, 49 aa, Homo sapiens
MLPTLTAPTLALLLLPKISCLLTSTHPRTQGSRAHFPRAWRTPQTPSSM

SEQ ID NO: 70147 - protein, 72 aa, Homo sapiens [sequence omitted]

SEQ ID NO: 70148 - protein, 305 aa, Homo sapiens
MSPTVIILACLGFFLDQSVWAHVGGQDKPFCSAWPSAVVPQGGHVTLRCHYRRGFNIFTLYKKDGVPVPELYNRIFWNSFLISPVTPAHAGTYRCRGFHPHSPTEWSAPSNPLVIMVTGLYEKPSLTARPGPTVRAGENVTLSCSSQSSFDIYHLSREGEAHELRLPAVPSINGTFQADFPLGPATHGETYRCFGSFHGSPYEWSDPSDPLPVSVTDSDEQDPQEVTYAQLDHCIFTQRKITGPSQRSKRPSTDTSVCIELPNAEPRALSPAHEHHSQALMGSSRETTALSQTQLASSNVPAAGI

SEQ ID NO: 70149 - protein, 8 aa, Homo sapiens
MLKYLFLF

SEQ ID NO: 70150 - protein, 255 aa, Homo sapiens [sequence omitted]

SEQ ID NO: 70151 - protein, 248 aa, Homo sapiens
MILILVNLAMTIWILKVMNFTIDGMGNLRITEKGLKLEGDSEFLQPLYAKEIQSRPGNALYFKSARNVTVNILNDQTKVLTQLITGPKAVEAYGKKFEVKTVSGKLLFSADNNEVVVGAERLRVLGAEGTVFPKSIETPNVRADPFKELRLESPTRSLVMEAPKGVEINAEAGNMEATCRTELRLESKDGEIKLDAAKIRLPRLPHGSYTPTGTRQKVFEICVCANGRLFLSQAGAGSTCQINTSVCL

SEQ ID NO: 70152 - protein, 105 aa, Homo sapiens
MCISSPFRFLALMLTAVSLVPTTQQVFNKYFFFFETVSVTQAGVQWYYLGSVQPLPPGFKRFSCLSLPSSRDYRPVPPCPANFCIFSRDGFLSCWPGWSRTPGLR

SEQ ID NO: 70153 - protein, 104 aa, Homo sapiens [sequence omitted]

SEQ ID NO: 70154 - protein, 26 aa, Homo sapiens
LKVILLGHWLLTTWSLWARQLCLSGS

SEQ ID NO: 70155 - protein, 24 aa, Homo sapiens
LLPAFGLMLSFTWYFLSVATPMKL

SEQ ID NO: 70156 - protein, 12 aa, Homo sapiens
IMLIVYVRFWWL

SEQ ID NO: 70157 - protein, 11 aa, Homo sapiens
LLLILRLLRIL

SEQ ID NO: 70158 - protein, 27 aa, Homo sapiens
ILLFCLPFLVALNEIQMHYPELKLPYF

SEQ ID NO: 70159 - protein, 7 aa, Homo sapiens
LLYGILF

SEQ ID NO: 70160 - protein, 9 aa, Homo sapiens
LIILILIWI

SEQ ID NO: 70161 - protein, 16 aa, Homo sapiens
KFTLLLTGVNVYLQSL

SEQ ID NO: 70162 - protein, 18 aa, Homo sapiens
LKGDTGPKWRSMILFLLG

SEQ ID NO: 70163 - protein, 237 aa, Homo sapiens
KSAWALLQLNEFLLMVILQDKEHTPKLMGFCGDLYVMESVEYTSLYGISLPWVIELFIPSGFRRSMDQLFTPSWPRKAKIAIGLLEFVEDVFHGPYGNFLMCDTSAKNLGYNDKYDLKMVDMRKIVPETNLKELIKDRHCESDLDCVYGTDCRTSCDQSTMKCTSEVIQPNLAKACQLLKDYLLRGAPSEIREELEKQLYSCIALKVTANQMEMEHSLILNNLKTLLWKKISYTNDS

SEQ ID NO: 70164 - protein, 261 aa, Homo sapiens
LCSLLLCECLLLVAGYAHDDDWIDPTDMLNYDAASGTMRKSQAKYGISGEKDVSPDLSCADEISECYHKLDSLTYKIDECEKKKREDYESQSNPVFRRYLNKILIEAGKLGLPDENKGDMHYDAEIILKRETLLEIQKFLNGEDWKPGALDDALSDILINFKFHDFETWKWRFEDSFGVDPYNVLMVLLCLLCIVVLVATELWTYVRWYTQLRRVLIISCAQSEASRVKQVGNLFQAWAFAVCDPVLLQVPVCPILVFCYS

SEQ ID NO: 70165 - protein, 28 aa, Homo sapiens
MLVLLLFLVKTLSCLKELLLMDQFHTPP

SEQ ID NO: 70166 - protein, 860 aa, Homo sapiens
TRRTVGEIKMTSHYVIAIFALMSSCLATAGPEPGALCELSPVSASHPVQALMESFTVLSGCASRGTTGLPQEVHVLNLRTAGQGPGQLQREVTLHLNPISSVHIHHKSVVFLLNSPHPLVWHLKTERLATGVSRLFLVSEGSVVQFSSANFSLTAETEERNFPHGNEHLLNWARKEYGAVTSFTELKIARNIYIKVGEDQVFPPKCNIGKNFLSLNYLAEYLQPKAAEGCVMSSQPQNEEVHIIELITPNSNPYSAFQVDITIDIRPSQEDLEVVKNLILILKCKKSVNWVIKSFDVKGSLKIIAPNSIGFGKESERSMTMTKSIRDDIPSTQGNLVKWALDNGYSPITSYTMAPVANRFHLRLENNAEEMGDEEVHTIPPELRILLDPGALPALQNPPIRGGEGQNGGLPFPFPDISRRVWNEEGEDGLPRPKDPVIPSIQLFPGLREPEEVQGSVDIALSVKCDNEKMIVAVEKDSFQASGYSGMDVTLLDPTCKAKMNGTHFVLESPLNGCGTRPRWSALDGVVYYNSIVIQVPALGDSSGWPDGYEDLESGDNGFPGDMDEGDASLFTRPEIVVFNCSLQQVRNPSSFQEQPHGNITFNMELYNTDLFLVPSQGVFSVPENGHVYVEVSVTKAEQELGFAIQTCFISPYSNPDRMSHYTIIENICPKDESVKFYSPKRVHFPIPQADMDKKRFSFVFKPVFNTSLLFLQCELTLCTKMEKHPQKLPKCVPPDEACTSLDASIIWAMMQNKKTFTKPLAVIHHEAESKEKGPSMKEPNPISPPIFHGLDTLTVMGIAFAAFVIGALLTGALWYIYSHTGETAGRQQVPTSPPASENSSAAHSIGSTQSTPCSSSSTA

SEQ ID NO: 70167 - protein, 317 aa, Homo sapiens
LRSLYLFYTCFCFSVLWLSTDASESRCQQGKTQFGVGLRSGGENHLWLLEGTPSLQSCWAACCQDSACHVFWWLEGMCIQADCSRPQSCRAFRTHSSNSMLVFLKKFQTADDLGFLPEDDVPHLLGLGWNWASWRQSPPRAALRPAVSSSDQQSLIRKLQKRGSPSDVVTPIVTQHSKVNDSNELGGLTTSGSAEVHKAITISSPLTTDLTAELSGGPKNVSVQPEISEGLATTPSTQQVKSSEKTQIAVPQPVAPSYSYATPTPQASFQSTSAPYPVIKELVVSAGESVQITLPKNEVQLNAYVLQEPPKAHSRPV

SEQ ID NO: 70168 - protein, 25 aa, Homo sapiens
IILLFISIILTFKGYLISCVWNCCR

SEQ ID NO: 70169 - protein, 12 aa, Homo sapiens
IMLIVYVRFWWL

SEQ ID NO: 70170 - protein, 214 aa, Homo sapiens
LLVGSQLAVMMYLSLGGFRSLSALFGRDQGPTFDYSHPRDVYSNLSHLPGAPGGPPAPQGLPYCPERSPLLVGPVSVSFSPVPSLAEIVERNPRVEPGGRYRPAGCEPRSRTAIIVPHRAREHHLRLLLYHLHPFLQRQQLAYGIYVIHQAGNGTFNRAKLLNVGVREALRDEEWDCLFLHDVDLLPENDHNLYVCDPRGPRHVAVAMNKFGYR

SEQ ID NO: 70171 - protein, 284 aa, Homo sapiens
ILAILLCSLALGSVTVHSSEPEVRIPENNPVKLSCAYSGFSSPRVEWKFDQGDTTRLVCYNNKITASYEDRVTFLPTGITFKSVTREDTGTYTCMVSEEGGNSYGEVKVKLIVLVPPSKPTVNIPSSATIGNRAVLTCSEQDGSPPSEYTWFKDGIVMPTNPKSTRAFSNSSYVLNPTTGELVFDPLSASDTGEYSCEARNGYGTPMTSNAVRMEAVERNVGVIVAAVLVTLILLGILVFGIWFAYSRGHFDRTKKGTSSKKVIYSQPSARSEGEFKQTSSFLV

SEQ ID NO: 70172 - protein, 83 aa, Homo sapiens
KHYILALAALHCSSVLLVEIWILRREHSTALSSQENSRCKKLQCINCREESTVLQAERATTALLFNEREKMKERENFRRLGPI

SEQ ID NO: 70173 - protein, 14 aa, Homo sapiens
MWYNCSAAFLSVLI

SEQ ID NO: 70174 - protein, 101 aa, Homo sapiens
VDVYAFGILFWYICSGSVKLPEAFERCASKDHLWNNVRRGARPERLPVFDEECWQLMEACWDGDPLKRPLLGIVQPMLQGIMNRLCKSNSEQPNRGLDDST

SEQ ID NO: 70175 - protein, 27 aa, Homo sapiens
MSNVLSVQFMACNLLLVTGITQENQEH

SEQ ID NO: 70176 - protein, 49 aa, Homo sapiens
LYFLLFSLLVKTRMKTSMMSHLHLMTVSHWPATCSRYSCAGCGTPHLCS

SEQ ID NO: 70177 - protein, 75 aa, Homo sapiens
LLFLLLVLIFPSLLGLQPGLLRNWKGGKTNLAYSNCFSSCARHYGSFSSLGLSVNKFGKLDNRPFTEMTILYIAI

SEQ ID NO: 70178 - protein, 59 aa, Homo sapiens
KFAFGEFHLWYQVALSMVACGKSAYAVSLLRECVKLRPSDPTVPLMAAKVCIGSLRWPP

SEQ ID NO: 70179 - protein, 33 aa, Homo sapiens
RHLSGCPTMATWALLLLAAMLLGNPAPASASAW

SEQ ID NO: 70180 - protein, 34 aa, Homo sapiens
VAGVLVLLVSLGVAMHLCCRRRRARLRFMKQFYK

SEQ ID NO: 70181 - protein, 474 aa, Homo sapiens
IGSGGFGLIYLAFPTNKPEKDARHVVKVEYQENGPLFSELKFYQRVAKKDCIKKWIERKQLDYLGIPLFYGSGLTEFKGRSYRFMVMERLGIDLQKISGQNGTFKKSTVLQLGIRMLDVLEYIHENEYVHGDIKAANLLLGYKNPDQVYLADYGLSYRYCPNGNHKQYQENPRKGHNGTIEFTSLDAHKGVALSRRSDVEILGYCMLRWLCGKLPWEQNLKDPVAVQTAKTNLLDELPQSVLKWAPSGSSCCEIAQFLVCAHSLAYDEKPNYQALKKILNPHGIPLGPLDFSTKGQSINVHTPNSQKVDSQKAATKQVNKAHNRLIEKKVHSERSAESCATWKVQKEEKLIGLMNNEAAQESTRRRQKYQESQEPLNEVNSFPQKISYTQFPNSFYEPHQDFTSPDIFKKSRSPSWYKYTSTVSTGITDLESSTGLWPTISQFTLSEETNADVYYYRIIIPVLLMLVFLALFFL

SEQ ID NO: 70182 - protein, 15 aa, Homo sapiens
IFLTMRSGNWMVFLC

SEQ ID NO: 70183 - protein, 199 aa, Homo sapiens
LFFLLFIPVFCKAMHVAQPAVVLASSRGIASFVCEYASPGKATEVRVTVLRQADSQVTEVCAATYMMGNELTFLDDSICTGTSSGNQVNLTIQGLRAMDTGLYICKVELMYPPPYYLGIGNGTQIYVIDPEPCPDSDFLLWILAAVSSGLFFYSFLLTAVSLSKMLKKRSPLTTGVYVKMPPTEPECEKQFQPYFIPIN

SEQ ID NO: 70184 - protein, 18 aa, Homo sapiens
LSFWISLFLVLSTKDPFL

SEQ ID NO: 70185 - protein, 9 aa, Homo sapiens
TMVVLFLTS

SEQ ID NO: 70186 - protein, 16 aa, Homo sapiens
ILFFFFFFFFLRILCG

SEQ ID NO: 70187 - protein, 222 aa, Homo sapiens
TMRPRLWLLLAAQLTVLHGNSVLQQTPAYIKVQTNKMVMLSCEAKISLSNMRIYWLRQRQAPSSDSHHEFLALWDSAKGTIHGEEVEQEKIAVFRDASRFILNLTSVKPEDSGIYFCMIVGSPELTFGKGTQLSVVDFLPTTAQPTKKSTLKKRVCRLPRPETQKGPLCSPITLGLLVAGVLVLLVSLGVAIHLCCRRRRARLRFMKQLRLHPLEKCSRMDY

SEQ ID NO: 70188 - protein, 199 aa, Homo sapiens
TMRPRLWLLLAAQLTVLHGNSVLQQTPAYIKVQTNKMVMLSCEAKISLSNMRIYWLRQRQAPSSDSHHEFLALWDSAKGTIHGEEVEQEKIAVFRDASRFILNLTSVKPEDSGIYFCMIVGSPELTFGKGTQLSVVDFLPTTAQPTKKSTLKKRVCRLPRPETQKGLKGKVYQEPLSPNACMDTTAILQPHRSCLTHGS

SEQ ID NO: 70189 - protein, 761 aa, Homo sapiens
KVLLGLLGAAALVTIITVPVVLLNKGTDDATADSRKTYTLTDYLKNTYRLKLYSLRWISDHEYLYKQENNILVFNAEYGNSSVFLENSTFDEFGHSINDYSISPDGQFILLEYNYVKQWRHSYTASYDIYDLNKRQLITEERIPNNTQWVTWSPVGHKLAYVWNNDIYVKIEPNLPSYRITWTGKEDIIYNGITDWVYEEEVFSAYSALWWSPNGTFLAYAQFNDTEVPLIEYSFYSDESLQYPKTVRVPYPKAGAVNPTVKFFVVNTDSLSSVTNATSIQITAPASMLIGDHYLCDVTWATQERISLQWLRRIQNYSVMDICDYDESSGRWNCLVARQHIEMSTTGWVGRFRPSEPHFTLDGNSFYKIISNEEGYRHICYFQIDKKDCTFITKGTWEVIGIEALTSDYLYYISNEYKGMPGGRNLYKIQLSDYTKVTCLSCELNPERCQYYSVSFSKEAKYYQLRCSGPGLPLYTLHSSVNDKGLRVLEDNSALDKMLQNVQMPSKKLDFIILNETKFWYQMILPPHFDKSKKYPLLLDVYAGPCSQKADTVFRLNWATYLASTENIIVASFDGRGSGYQGDKIMHAINRRLGTFEVEDQIEAARQFSKMGFVDNKRIAIWGWSYGGYVTSMVLGSGSGVFKCGIAVAPVSRWEYYDSVYTERYMGLPTPEDNLDHYRNSTVMSRAENFKQVEYLLIHGTADDNVHFQQSAQISKALVDVGVDFQAMWYTDEDHGIASSTAHQHIYTHMSHFIKQCFSLP

SEQ ID NO: 70190 - protein, 9 aa, Homo sapiens
ISLSICLWL

SEQ ID NO: 70191 - protein, 13 aa, Homo sapiens
LAKMHIFFTTFAL

SEQ ID NO: 70192 - protein, 353 aa, Homo sapiens
LSTFCLLLLYLIGAVIAGRDFYKILGVPRSASIKDIKKAYRKLALQLHPDRNPDDPQAQEKFQDLGAAYEVLSDSEKRKQYDTYGEEGLKDGHQSSHGDIFSHFFGDFGFMFGGTPRQQDRNIPRGSDIIVDLEVTLEEVYAGNFVEVVRNKPVARQAPGKRKCNCRQEMRTTQLGPGRFQMTQEVVCDECPNVKLVNEERTLEVEIEPGVRDGMEYPFIGEGEPHVDGEPGDLRFRIKVVKHPIFERRGDDLYTNVTISLVESLVGFEMDITHLDGHKVHISRDKITRPGAKLWKKGEGLPNFDNNNIKGSLIITFDVDFPKEQLTEEAREGIKQLLKQGSVQKVYNGLQGY

SEQ ID NO: 70193 - protein, 126 aa, Homo sapiens
LLVDDLSVLLSLGMGAVAVLDFIHYCRATVCWELKGNMVVLVHDSGDAEDEENDILLNGLSHQSHLILRAEGLATGFCRDVHGQLRILWRRPSQPAVHRDQSFTYQYKIQDKSVSFFAKGMSPAVL

SEQ ID NO: 70194 - protein, 8 aa, Homo sapiens
LLLINLFL

SEQ ID NO: 70195 - protein, 11 aa, Homo sapiens
VGMCIFLFWTI

SEQ ID NO: 70196 - protein, 12 aa, Homo sapiens
VLFVIIFLRMKA

SEQ ID NO: 70197 - protein, 897 aa, Homo sapiens
IYFWGGLLPFGMLCASSTTKCTVSHEVADCSHLKLTQVPDDLPTNITVLNLTHNQLRRLPAANFTRYSQLTSLDVGFNTISKLEPELCQKLPMLKVLNLQHNELSQLSDKTFAFCTNLTELHLMSNSIQKIKNNPFVKQKNLITLDLSHNGLSSTKLGTQVQLENLQELLLSNNKIQALKSEELDIFANSSLKKLELSSNQIKEFSPGCFHAIGRLFGLFLNNVQLGPSLTEKLCLELANTSIRNLSLSNSQLSTTSNTTFLGLKWTNLTMLDLSYNNLNVVGNDSFAWLPQLEYFFLEYNNIQHLFSHSLHGLFNVRYLNLKRSFTKQSISLASLPKIDDFSFQWLKCLEHLNMEDNDIPGIKSNMFTGLINLKYLSLSNSFTSLRTLTNETFVSLAHSPLHILNLTKNKISKIESDAFSWLGHLEVLDLGLNEIGQELTGQEWRGLENIFEIYLSYNKYLQLTRNSFALVPSLQRLMLRRVALKNVDSSPSPFQPLRNLTILDLSNNNIANINDDMLEGLEKLEILDLQHNNLARLWKHANPGGPIYFLKGLSHLHILNLESNGFDEIPVEVFKDLFELKIIDLGLNNLNTLPASVFNNQVSLKSLNLQKNLITSVEKKVFGPAFRNLTELDMRFNPFDCTCESIAWFVNWINETHTNIPELSSHYLCNTPPHYHGFPVRLFDTSSCKDSAPFELFFMINTSILLIFIFIVLLIHFEGWRISFYWNVSVHRVLGFKEIDRQTEQFEYAAYIIHAYKDKDWVWEHFSSMEKEDQSLKFCLEERDFEAGVFELEAIVNSIKRSRKIIFVITHHLLKDPLCKRFKVHHAVQQAIEQNLDSIILVFLEEIPDYKLNHALCLRRGMFKSHCILNWPVQKERIGAFRHKLQVALGSKNSVH

SEQ ID NO: 70198 - protein, 112 aa, Homo sapiens
LRGLPALLLLLLFLGPWPAASHGGKYSREKNQPKPSPKRESGEEFRMEKLNQLWEKAQRLHLPPVRLAELHADLKIQERDELAWKKLKLDGLDEDGEKEARLIRNLNGNHIK

SEQ ID NO: 70199 - protein, 24 aa, Homo sapiens
KDMAVRGRLLTALVLPDLLLPALG

SEQ ID NO: 70200 - protein, 21 aa, Homo sapiens
LLLLMVMAAAVAATVQTPSPL

SEQ ID NO: 70201 - protein, 33 aa, Homo sapiens
ILAVVMLYWWHQSTVYVMQYRHSKPCPDYVSHL

SEQ ID NO: 70202 - protein, 28 aa, Homo sapiens
IDATRVNMLYILMIALGHRSLKAQMDGI

SEQ ID NO: 70203 - protein, 343 aa, Homo sapiens
KSNLPVLLVPFLLCQALVRCSSPLPLVVNTWPFKNATEAAWRALASGGSALDAVESGCAMCEREQCDGSVGFGGSPDELGETTLDAMIMDGTTMDVGAVGDLRRIKNAIGVARKVLEHTTHTLLVGESATTFAQSMGFINEDLSTTASQALHSDWLARNCQPNYWRNVIPDPSKYCGPYKPPGILKQDIPIHKETEDDRGHDTIGMVVIHKTGHIAAGTSTNGIKFKIHGRVGDSPIPGAGAYADDTAGAAAATGNGDILMRFLPSYQAVEYMRRGEDPTIACQKVISRIQKHFPEFFGAVICANVTGSYGAACNKLSTFTQFSFMVYNSEKNQPTEEKVDCI

SEQ ID NO: 70204 - protein, 12 aa, Homo sapiens
MGKLLAWLAVGM

SEQ ID NO: 70205 - protein, 38 aa, Homo sapiens
VNANTILQFFFSILNIFLFTADPLPYDFIGKQGPAIIC

SEQ ID NO: 70206 - protein, 40 aa, Homo sapiens [sequence omitted]

SEQ ID NO: 70207 - protein, 322 aa, Homo sapiens
LNRFAGFGIGLASLFTENVLAHPCIVLRRQCQVNYHAQHYHLTPFTVINIMYSFNKTQGPRALWKGMGSTFIVQGVTLGAEGIISEFTPLPREVLHKWSPKQIGEHLLLKSLTYVVAMPFYSASLIETVQSEIIRDNTGILECVKEGIGRVIGMGVPHSKRLLPLLSLIFPTVLHGVLHYIISSVIQKFVLLILKRKTYNSHLAESTSPVQSMLDAYFPELIANFAASLCSDVILYPLETVLHRLHIQGTRTIIDNTDLGYEVLPINTQYEGMRDCINTIRQEEGVFGFYKGFGAVIIQYTLHAAVLQITKIIYSTLLQNNI

SEQ ID NO: 70208 - protein, 9 aa, Homo sapiens
LVSAMFFFF

SEQ ID NO: 70209 - protein, 28 aa, Homo sapiens
VHLLKLLLFYAADLNPDAEPFQKGWSGS

SEQ ID NO: 70210 - protein, 787 aa, Homo sapiens
KRGNMVRAARALLSAVTRLLILADMADVYKLLVQLKVVEDGILKLRNAGNEQDLGIQYKALKPEVDKLNIMAAKRQQELKDVGHRDQMAAARGILQKNVPILYTASQACLQHPDVAAYKANRDLIYKQLQQAVTGISNAAQATASDDASQHQGGGGGELAYALNNFDKQIIVDPLSFSEERFRPSLEERLESIISGAALMADSSCTRDDRRERIVAECNAVRQALQDLLSEYMGNAGRKERSDALNSAIDKMTKKTRDLRRQLRKAVMDHVSDSFLETNVPLLVLIEAAKNGNEKEVKEYAQVFREHANKLIEVANLACSISNNEEGVKLVRMSASQLEALCPQVINAALALAAKPQSKLAQENMDLFKEQWEKQVRVLTDAVDDITSIDDFLAVSENHILEDVNKCVIALQEKDVDGLDRTAGAIRGRAARVIHVVTSEMDNYEPGVYTEKVLEATKLLSNTVMPRFTEQVEAAVEALSSDPAQPMDENEFIDASRLVYDGIRDIRKAVLMIRTPEELDDSDFETEDFDVRSRTSVQTEDDQLIAGQSARAIMAQLPQEQKAKIAEQVASFQEEKSKLDAEVSKWDDSGNDIIVLAKQMCMIMMEMTDFTRGKGPLKNTSDVISAAKKIAEAGSRMDKLGRTIADHCPDSACKQDLLAYLQRIALYCHQLNICSKVKAEVQNLGGELVVSGVDSAMSLIQAAKNLMNAVVQTVKASYVASTKYQKSQGMASLNLPAVSWKMKAPEKKPLVKREKQDETQTKIKRASQKKHVNPVQALSEFKAMDSI

SEQ ID NO: 70211 - protein, 16 aa, Homo sapiens
MNFVFFVFEKIMLLLY

SEQ ID NO: 70212 - protein, 19 aa, Homo sapiens
ILYIFIFVDFLKASENTTD

SEQ ID NO: 70213 - protein, 24 aa, Homo sapiens
MLESVFLSWCFLLFWVSSLPKCFI

SEQ ID NO: 70214 - protein, 15 aa, Homo sapiens
MTITHVFMVLIRFVS

SEQ ID NO: 70215 - protein, 39 aa, Homo sapiens
IRGLSKIAVFVLELQDFAFPSISVCQFSISCVCNVEIFW

SEQ ID NO: 70216 - protein, 337 aa, Homo sapiens
LAEMKMASSLAFLLLNFHVSLLLVQLLTPCSAQFSVLGPSGPILAMVGEDADLPCHLFPTMSAETMELKWVSSSLRQVVNVYADGKEVEDRQSAPYRGRTSILRDGITAGKAALRIHNVTASDSGKYLCYFQDGDFYEKALVELKVAALGSNLHVEVKGYEDGGIHLECRSTGWYPQPQIQWSNAKGENIPAVEAPVVADGVGLYEVAASVIMRGGSGEGVSCIIRNSLLGLEKTASISIADPFFRSAQPWIAALAGTLPILLLLLAGASYFLWRQQKEITALSSEIESEQEMKEMGYAATEREISLRESLQEELKRKKIQYLTRGEESSSDTNKSA

SEQ ID NO: 70217 - protein, 266 aa, Homo sapiens
LLLPLLLLLLLLLPAPELGPSQAGAEENDWVRLPSKCEVCKYVAVELKSAFEETGKTKEVIGTGYGILDQKASGVKYTKSDLRLIEVTETICKRLLDYSLHKERTGSNRFAKGMSETFETLHNLVHKGVKVVMDIPYELWNETSAEVADLKKQCDVLVEEFEEVIEDWYRNHQEEDLTEFLCANHVLKGKDTSCLAEQWSGKKGDTAALGGKKSKKKSSRAKAAGGRSSSSKQRKELGGLEGDPSPEEDEGIQKASPLTHSPPDEL

SEQ ID NO: 70218 - protein, 102 aa, Homo sapiens
MWSSIRLLSPVLSLILLLIALELVNIHAVCGKNAHEYQQYLKFVKSILQYTENLVAYTSYEKNKWNETINLTHTALLKMWTFSEKKQMLIHLAKKSTSKVLL

SEQ ID NO: 70219 - protein, 1230 aa, Homo sapiens
LFLFALYIMCVPHSVWGCANCRVVLSNPSGTFTSPCYPNDYPNSQACMWTLRAPTGYIIQITFNDFDIEEAPNCIYDSLSLDNGESQTKFCGATAKGLSFNSSANEMHVSFSSDFSIQKKGFNASYIRVAVSLRNQKVILPQTSDAYQVSVAKSISIPELSAFTLCFEATKVGHEDSDWTAFSYSNASFTQLLSFGKAKSGYFLSISDSKCLLNNALPVKEKEDIFAESFEQLCLVWNNSLGSIGVNFKRNYETVPCDSTISKVIPGNGKLLLGSNQNEIVSLKGDIYNFRLWNFTMNAKILSNLSCNVKGNVVDWQNDFWNIPNLALKAESNLSCGSYLIPLPAAELASCADLGTLCQATVNSPSTTPPTVTTNMPVTNRIDKQRNDGIIYRISVVIQNILRHPEVKVQSKVAEWLNSTFQNWNYTVYVVNISFHLSAGEDKIKVKRSLEDEPRLVLWALLVYNATNNTNLEGKIIQQKLLKNNESLDEGLRLHTVNVRQLGHCLAMEEPKGYYWPSIQPSEYVLPCPDKPGFSASRICFYNATNPLVTYWGPVDISNCLKEANEVANQILNLTADGQNLTSANITNIVEQVKRIVNKEENIDITLGSTLMNIFSNILSSSDSDLLESSSEALKTIDELAFKIDLNSTSHVNITTRNLALSVSSLLPGTNAISNFSIGLPSNNESYFQMDFESGQVDPLASVILPPNLLENLSPEDSVLVRRAQFTFFNKTGLFQDVGPQRKTLVSYVMACSIGNITIQNLKDPVQIKIKHTRTQEVHHPICAFWDLNKNKSFGGWNTSGCVAHRDSDASETVCLCNHFTHFGVLMDLPRSASQLDARNTKVLTFISYIGCGISAIFSAATLLTYVAFEKLRRDYPSKILMNLSTALLFLNLLFLLDGWITSFNVDGLCIAVAVLLHFFLLATFTWMGLEAIHMYIALVKVFNTYIRRYILKFCIIGWGLPALVVSVVLASRNNNEVYGKESYGKEKGDEFCWIQDPVIFYVTCAGYFGVMFFLNIAMFIVVMVQICGRNGKRSNRTLREEVLRNLRSVVSLTFLLGMTWGFAFFAWGPLNIPFMYLFSIFNSLQGLFIFIFHCAMKENVQKQWRQHLCCGRFRLADNSDWSKTATNIIKKSSDNLGKSLSSSSIGSNSTYLTSKSKSSSTTYFKRNSHTDSASMDKSLSKLAHADGDQTSIIPVHQVIDKVKGYCNAHSDNFYKNIIMSDTFSHSTKF

SEQ ID NO: 70220 - protein, 212 aa, Homo sapiens
LLGTVVALKVVLYLLRVCLAMAWKSGGASHSELIHNLRKNGIIKTDKVFEVMLATDRSHYAKCNPYMDSPQSIGFQATISAPHMVGCTGKVIGIDHIKELVDDSVNNVRKDDPTLLSSGRVQLVVGDGRMGYAEEAPYDAIHVGAAAPVVPQALIDQLKPGGRLILPVGPAGGNQMLEQYDKLQDGSIKMKPLMGVIYVPLTDKEKQWSRWK

SEQ ID NO: 70221 - protein, 14 aa, Homo sapiens
LLVSSVFFPLLSLC

SEQ ID NO: 70222 - protein, 34 aa, Homo sapiens
VIVFFVIFIKHLIHSQIPALQDMHAEIAQPLLQA

SEQ ID NO: 70223 - protein, 73 aa, Homo sapiens
MGHERRQTLNLITMLAIRVLADQNVIPNVANVTCYYQPAPYVADANFSNYYIAQVQPVFTCQQQTYSTWLPCN

SEQ ID NO: 70224 - protein, 17 aa, Homo sapiens
VGTVLIIMGTYVSSVPR

SEQ ID NO: 70225 - protein, 10 aa, Homo sapiens
TFDCLIGLFL

SEQ ID NO: 70226 - protein, 14 aa, Homo sapiens
ITRFIFALVSLAGG

SEQ ID NO: 70227 - protein, 18 aa, Homo sapiens
LKTVFPTFVKLCMFLLPM

SEQ ID NO: 70228 - protein, 37 aa, Homo sapiens; identical to SEQ ID NO: 69314

SEQ ID NO: 70229 - protein, 452 aa, Homo sapiens
ILAFFGFFIVYALRVNLSVALVDMVDSNTTLEDNRTSKACPEHSAPIKVHHNQTGKKYQWDAETQGWILGSFFYGYIITQIPGGYVASKIGGKMLLGFGILGTAVLTLFTPIAADLGVGPLIVLRALEGLGEGVTFPAMHAMWSSWAPPLERSKLLSISYAGAQLGTVISLPLSGIICYYMNWTYVFYFFGTIGIFWFLLWIWLVSDTPQKHKRISHYEKEYILSSLRNQLSSQKSVPWVPILKSLPLWAIVVAHFSYNWTFYTLLTLLPTYMKEILRFNVQENGFLSSLPYLGSWLCMILSGQAADNLRAKWNFSTLCVRRIFSLIGMIGPAVFLVAAGFIGCDYSLAVAFLTISTTLGGFCSSGFSINHLDIAPSYAGILLGITNTFATIPGMVGPVIAKSLTPDNTVGEWQTVFYIAAAINVFGAIFFTLFAKGEVQNWALNDHHGHRH

SEQ ID NO: 70230 - protein, 279 aa, Homo sapiens
LLPLLSLLVGAWLKLGNGQATSMVQLQGGRFLMGTNSPDSRDGDGPVREATVKPFAIDIFPVTNKDFRDFVREKKYRTEAEMFGWSFVFEDFVSDELRNKATQPMKPAGPGSGIRERLEHPVLHVSWNDARAYCAWRGKRLPTEEEWEFAARGGLKGQVYPWGNWFQPNRTNLWQGKFPKGDKAEDGFHGVSPVNAFPAQNNYGLYDLLGNVWEWTASPYQAAEQDMRVLRGASWIDTADGSANHRARVTTRMGNTPDSASDNLGFRCAADAGRPPGEL

SEQ ID NO: 70231 - protein, 57 aa, Homo sapiens
LNQKLLFSSPASALLFFARPCVFCFKASKMGPQFENYPTFPTYSPLPIIPFQLHGRF

SEQ ID NO: 70232 - protein, 35 aa, Homo sapiens
MRFSMMFGYCLIMTIFSGKEQPMHLHSITWTSLLQ

SEQ ID NO: 70233 - protein, 7 aa, Homo sapiens
IIIGFYI

SEQ ID NO: 70234 - protein, 16 aa, Homo sapiens
LVFLTILMYNYLLLLI

SEQ ID NO: 70235 - protein, 73 aa, Homo sapiens
LCGQAALLLGNLLLLHCVSRSHSQNATAEPELTSAGAAQPEGPGGAASWEYGDPHSPVILCSYLITPFFNISF

SEQ ID NO: 70236 - protein, 31 aa, Homo sapiens
VDIFFVVPALLLTGDMVHGLGQSVVQSVDKR

SEQ ID NO: 70237 - protein, 32 aa, Homo sapiens
IAFLSPLSLIFLAKFLKKADTRDSRQACLGER

SEQ ID NO: 70238 - protein, 19 aa, Homo sapiens
IFKYSRKKITSLSMLLLIL

SEQ ID NO: 70239 - protein, 10 aa, Homo sapiens
ISINRLFWFL

SEQ ID NO: 70240 - protein, 737 aa, Homo sapiens
LLSAGSCLALLFYFGGLQFRASRSHSRREEHSGRNGLHHPSPDHFWPRFPDALRPFVPWDQLENEDSSVHISPRQKRDANSSIYKGKKCRMESCFDFTLCKKNGFKVYVYPQQKGEKIAESYQNILAAIEGSRFYTSDPSQACLFVLSLDTLDRDQLSPQYVHNLRSKVQSLHLWNNGRNHLIFNLYSGTWPDYTEDVGFDIGQAMLAKASISTENFRPNFDVSIPLFSKDHPRTGGERGFLKFNTIPPLRKYMLVFKGKRYLTGIGSDTRNALYHVHNGEDVVLLTTCKHGKDWQKHKDSRCDRDNTEYEKYDYREMLHNATFCLVPRGRRLGSFRFLEALQAACVPVMLSNGWELPFSEVINWNQAAVIGDERLLLQIPSTIRSIHQDKILALRQQTQFLWEAYFSSVEKIVLTTLEIIQDRIFKHISRNSLIWNKHPGGLFVLPQYSSYLGDFPYYYANLGLKPPSKFTAVIHAVTPLVSQSQPVLKLLVAAAKSQYCAQIIVLWNCDKPLPAKHRWPATAVPVVVIEGESKVMSSRFLPYDNIITDAVLSLDEDTVLSTTEVDFAFTVWQSFPERIVGYPARSHFWDNSKERWGYTSKWTNDYSMVLTGAAIYHKYYHYLYSHYLPASLKNMVDQLANCEDILMNFLVSAVTKLPPIKVTQKKQYKETMMGQTSRASRWADPDHFAQRQSCMNTFASWFGYMPLIHSQMRLDPVLFKDQVSILRKKYRDIERL

SEQ ID NO: 70241 - protein, 773 aa, Homo sapiens
LPPALLLLLLFSVLGPGAGGLFLTDYSTCSPRKLSPFRSFASTELFHFHVPEDTFLAVWNLIIFKEQGGTFGDHCPDQSVTVYFRSGAPPVINPLHTHFPGDTAVPGVFSLTLSWTLPNRTSGIFNVSSPLPGDWFLAAHLPQAHGHISVKGLQDECQYLLQPQLIVRRLLDVAVLVPGRPSEQTLSPHNRSALYKVFVPSFTYRVSAQLVCVGGRGVSACPLSLRLRPKAPPLHNSSSVACGGASGCQLELALPPWGHWVYVRVETSSRGPGRTIRFQLCVRLQECPQPGLLRALVPGAAMNMPQSLGNQPLPPEPPSLGTPAEGPGTTSPPEHCWPVRPTLRNELDTFSVHFYIFFGPSVALPPERPAVFAMRLLPVLDSGGVLSLELQLNASSVRQENVTVFGCLTHEVPLSLGDAAVTCSKESLAGFLLSVSATTRVARLRIPFPQTGTWFLALRSLCGVGPRFVRCRNATAEVRMRTFLSPCVDDCGPYGQCKLLRTHNYLYAACECKAGWRGWGCTDSADALTYGFQLLSTLLLCLSNLMFLPPVVLAIRSRYVLEAAVYTFTMFFSTFYHACDQPGIVVFCIMDYDVLQFCDFLGSLMSVWVTVIAMARLQPVVKQVLYLLGAMLLSMALQLDRHGLWNLLGPSLFALGILATAWTVRSVRRRHCYPPTWRRWLFYLCPGSLIAGSAVLLYAFVETRDNYFYIHSIWHMLIAGSVGFLLPPRAKTDHGVPSGARARGCGYQLCINEQEELGLVGPGGATVSSICAS

SEQ ID NO: 70242 - protein, 26 aa, Homo sapiens
IFFFVQMILIIGMHSFFNMQIKSLKT

SEQ ID NO: 70243 - protein, 13 aa, Homo sapiens
MTFKHRIIISLCF

SEQ ID NO: 70244 - protein, 42 aa, Homo sapiens
KPFLLGTVFFTCFPIPLMRISPCLCKYRIRDKRPYNMIFGMN

SEQ ID NO: 70245 - protein, 9 aa, Homo sapiens
IKLTILFYY

SEQ ID NO: 70246 - protein, 18 aa, Homo sapiens
VESFVFLLFSIRVSCSAA

SEQ ID NO: 70247 - protein, 30 aa, Homo sapiens
VAGCVFLLISVLLLSGLTWQRRQRKSRRTI

SEQ ID NO: 70248 - protein, 18 aa, Homo sapiens
LGQDKSKTIFLLLSVMMH

SEQ ID NO: 70249 - protein, 41 aa, Homo sapiens
LLFSSFLWFAIRCGCSLDRKGKYTLTPRSPGQKSRWAQWVP

SEQ ID NO: 70250 - protein, 677 aa, Homo sapiens
LWLLWGLLLHQGQSLSHSHSEKATGTSSGANSEESTAAEFCRIDKPLCHSEDEKLSFEAVRNIHKLMDDDANGDVDVEESDEFLREDLNYHDPTVKHSTFHGEDKLISVEDLWKAWKSSEVYNWTVDEVVQWLITYVELPQYEETFRKLQLSGHAMPRLAVTNTTMTGTVLKMTDRSHRQKLQLKALDTVLFGPPLLTRHNHLKDFMLVVSIVIGVGGCWFAYIQNRYSKEHMKKMMKDLEGLHRAEQSLHDLQERLHKAQEEHRTVEVEKVHLEKKLRDEINLAKQEAQRLKELREGTENERSRQKYAEEELEQVREALRKAEKELESHSSWYAPEALQKWLQLTHEVEVQYYNIKKQNAEKQLLVAKEGAEKIKKKRNTLFGTFHVAHSSSLDDVDHKILTAKQALSEVTAALRERLHRWQQIEILCGFQIVNNPGIHSLVAALNIDPSWMGSTRPNPAHFIMTDDVDDMDEEIVSPLSMQSPSLQSSVRQRLTEPQHGLGSQRDLTHSDSESSLHMSDRQRVAPKPPQMSRAADEALNAMTSNGSHRLIEGVHPGSLVEKLPDSPALAKKALLALNHGLDKAHSLMELSPSAPPGGSPHLDSSRSHSPSSPDPDTPSPVGDSRALQASRNTRIPHLAGKKAVAEEDNGSIGEETDSSPGRKKFPLKIFKKPLKK

SEQ ID NO: 70251 - protein, 32 aa, Homo sapiens
KFRSLFFGSILAPVRSPQGPSPVLAEDSEGEG

SEQ ID NO: 70252 - protein, 99 aa, Homo sapiens
IGVLAIAGLPTADLLTAGRATAALPTADLATGNLATADLTTAHLVTVTLATADITAAGLTRSLGPPLALALHQPPNRALRDDPSPPRSPGLARGPGLHL

SEQ ID NO: 70253 - protein, 11 aa, Homo sapiens
MCRFVVIHILL

SEQ ID NO: 70254 - protein, 857 aa, Homo sapiens
LQTKDLIWTLFFLGTAVSLQVDIVPSQGEISVGESKFFLCQVAGDAKDKDISWFSPNGEKLTPNQQRISVVWNDDSSSTLTIYNANIDDAGIYKCVVTGEDGSESEATVNVKIFQKLMFKNAPTPQEFREGEDAVIVCDVVSSLPPTIIWKHKGRDVILKKDVRFIVLSNNYLQIRGIKKTDEGTYRCEGRILARGEINFKDIQVIVNVPPTIQARQNIVNATANLGQSVTLVCDAEGFPEPTMSWTKDGEQIEQEEDDEKYIFSDDSSQLTIKKVDKNDEAEYICIAENKAGEQDATIHLKVFAKPKITYVENQTAMELEEQVTLTCEASGDPIPSITWRTSTRNISSEEKASWTRPEKQETLDGHMVVRSHARVSSLTLKSIQYTDAGEYICTASNTIGQDSQSMYLEVQYAPKLQGPVAVYTWEGNQVNITCEVFAYPSATISWFRDGQLLPSSNYSNIKIYNTPSASYLEVTPDSENDFGNYNCTAVNRIGQESLEFILVQADTPSSPSIDQVEPYSSTAQVQFDEPEATGGVPILKYKAEWRAVGEEVWHSKWYDAKEASMEGIVTIVGLKPETTYAVRLAALNGKGLGEISAASEFKTQPVPGEPSAPKLEGQMGEDGNSIKVNLIKQDDGGSPIRHYLVRYRALSSEWKPEIRLPSGSDHVMLKSLDWNAEYEVYVVAENQQGKSKAAHFVFRTSAQPTAIPANGSPTSGLSTGAIVGILIVIFVLLLVVVDITCYFLNKCGLFMCIAVNLCGKAGPGAKGKDMEEGKAAFSKDESKEPIVEVRTEEERTPNHDGGKHTEPNETTPLTEPEKGPVEAKPECQETETKPAPAEVKTVPNDATQTKENESKA

SEQ ID NO: 70255 - protein, 43 aa, Homo sapiens
LLLLGLLGFLALLALMSRLGRAAADSDPNLDPLMNPHIRVGPS

SEQ ID NO: 70256 - protein, 51 aa, Homo sapiens
RSVSWLSAISFISQITLGVTNVVLERCLLELKEIWILVIPHQAYFDSYRLK

SEQ ID NO: 70257 - protein, 25 aa, Homo sapiens
LQSPRSWFLLCVFLACQLFINHILK

SEQ ID NO: 70258 - protein, 27 aa, Homo sapiens
LWMTFSLAAMSCWLSLVPSSLEASSWF

SEQ ID NO: 70259 - protein, 16 aa, Homo sapiens
MPLRAWLLPMVVWVMV

SEQ ID NO: 70260 - protein, 92 aa, Homo sapiens
LLGVLFFQGVYIVFSLEIRADAHVRGYVGEKIKLKCTFKSTSDVTDKLTIDWTYRPPSSSHTVSVLAPCFPLWPFFPSLSLCPQPWWLLCCW

SEQ ID NO: 70261 - protein, 219 aa, Homo sapiens
LLGVLFFQGVYIVFSLEIRADAHVRGYVGEKIKLKCTFKSTSDVTDKLTIDWTYRPPSSSHTVSIFHYQSFQYPTTAGTFRDRISWVGNVYKGDASISISNPTIKDNGTFSCAVKNPPDVHHNIPMTELTVTERGFGTMLSSVALLSILVFVPSAVVVALLLVRMGRKAAGLKKRSRSGYKKSSIEVSDDTDQEEEEACMARLCVRCAECLDSDYEETY

SEQ ID NO: 70262 - protein, 98 aa, Homo sapiens
IGALVLGAGLLFSLRSVRSVVLRAGGQQVTLTTHAPFGLGAHFTVPLKQVSCMAHRGEVPAMLPLKVKGRRFYFLLDKTGHFPNTKLFDNTVGAYRSL

SEQ ID NO: 70263 - protein, 45 aa, Homo sapiens
VLFFSLFCLCISSNCLFKMPRIWTPSTSNRHWEGEGRKAECKMKW

SEQ ID NO: 70264 - protein, 7 aa, Homo sapiens
LFLFFVF

SEQ ID NO: 70265 - protein, 67 aa, Homo sapiens
VPDLLLPLVLLELLVGIYPSGVIGLVPHLGDREKRDSVCPQGKYIHPQNNSICCTKCHKEPVPALLE

SEQ ID NO: 70266 - protein, 18 aa, Homo sapiens
LRGKPWFVVFLVCVTPVG

SEQ ID NO: 70267 - protein, 167 aa, Homo sapiens
VTLGILCLLLLMIVTVLVTNIFQCIQEKHQRQEILRNCSEKYIMQNDNYLKEQILTNKTLKFDVLKNSFQQKKELDSRLIQKNRCHRENEIVFKVLQNTGKFSEDHGSCCGVNCYYFTMQKKDWKGCKQTCQHCRSSLLKIDDKDELVFYIHFYSLGLCFSMLDLRY

SEQ ID NO: 70268 - protein, 1240 aa, Homo sapiens
RYGLYVCFLGVVVTIVSAFQFGEVVLEWSRDQYHVLFDSYRDNIAGKSFQNRLCLPMPIDVVYTWVNGTDLELLKELQQVREQMEEEQKAMREILGKNTTEPTKKSEKQLECLLTHCIKVPMLVLDPALPANITLKDLPSLYPSFHSASDIFNVAKPKNPSTNVSVVVFDSTKDVEDAHSGLLKGNSRQTVWRGYLTTDKEVPGLVLMQDLAFLSGFPPTFKETNQLKTKLPENLSSKVKLLQLYSEASVALLKLNNPKDFQELNKQTKKNMTIDGKELTISPAYLLWDLSAISQSKQDEDISASRFEDNEELRYSLRSIERHAPWVRNIFIVTNGQIPSWLNLDNPRVTIVTHQDVFRNLSHLPTFSSPAIESHIHRIEGLSQKFIYLNDDVMFGKDVWPDDFYSHSKGQKVYLTWPVPNCAEGCPGSWIKDGYCDKACNNSACDWDGGDCSGNSGGSRYIAGGGGTGSIGVGQPWQFGGGINSVSYCNQGCANSWLADKFCDQACNVLSCGFDAGDCGQDHFHELYKVILLPNQTHYIIPKGECLPYFSFAEVAKRGVEGAYSDNPIIRHASIANKWKTIHLIMHSGMNATTIHFNLTFQNTNDEEFKMQITVEVDTREGPKLNSTAQKGYENLVSPITLLPEAEILFEDIPKEKRFPKFKRHDVNSTRRAQEEVKIPLVNISLLPKDAQLSLNTLDLQLEHGDITLKGYNLSKSALLRSFLMNSQHAKIKNQAIITDETNDSLVAPQEKQVHKSILPNSLGVSERLQRLTFPAVSVKVNGHDQGQNPPLDLETTARFRVETHTQKTIGGNVTKEKPPSLIVPLESQMTKEKKITGKEKENSRMEENAENHIGVTEVLLGRKLQHYTDSYLGFLPWEKKKYFQDLLDEEESLKTQLAYFTDSKNTGRQLKDTFADSLRYVNKILNSKFGFTSRKVPAHMPHMIDRIVMQELQDMFPEEFDKTSFHKVRHSEDMQFAFSYFYYLMSAVQPLNISQVFDEVDTDQSGVLSDREIRTLATRIHELPLSLQDLTGLEHMLINCSKMLPADITQLNNIPPTQESYYDPNLPPVTKSLVTNCKPVTDKIHKAYKDKNKYRFEIMGEEEIAFKMIRTNVSHVVGQLDDIRKNPRKFVCLNDNIDHNHKDAQTVKAVLRDFYESMFPIPSQFELPREYRNRFLHMHELQEWRAYRDKLKFWTHCVLATLIMFTIFSFFAEQLIALKRKIFPRRRIHKEASPNRIRV

SEQ ID NO: 70269 - protein, 97 aa, Homo sapiens
LFHMPRKRMISLRFLAWYFLDLKIQGETHDSIEDARTALQLYRKYLELSKNGTEPESFHKVLKGLYEKGRKMDWKVPEPEGQTSPKNAAVFSSVLAL

SEQ ID NO: 70270 - protein, 53 aa, Homo sapiens
KYTPLNKIWSMFVSLYLISPESGNYLYLLSVYCVPGTISMCIEKPWKAIQQYI

SEQ ID NO: 70271 - protein, 49 aa, Homo sapiens
IGVILCQSVSMVILYRLFLSHSLYWEVSSLSSVTLPLTISSGHKSRPHF

SEQ ID NO: 70272 - protein, 6 aa, Homo sapiens
IVIFVL

SEQ ID NO: 70273 - protein, 8 aa, Homo sapiens
IILIALNI

SEQ ID NO: 70274 - protein, 11 aa, Homo sapiens
MTMLRLVLFVI

SEQ ID NO: 70275 - protein, 28 aa, Homo sapiens
LVTPMCILLTLMVLLWEQQHLLHRPVSS

SEQ ID NO: 70276 - protein, 10 aa, Homo sapiens
MIQCCIMILL

SEQ ID NO: 70277 - protein, 814 aa, Homo sapiens
ISFVIMCIFYMPTVNSLPELSPQKYFSTLQPGKASLAYFCQADSPRTSVFLEELNEAVRPLQDYGISVAKVNCVKEEISRYCGKEKDLMKAYLFKGNILLREFPTDTLFDVNAIVAHVLFALLFSEVKYITNLEDLQNIENALKGKANIIFSYVRAIGIPEHRAVMEAAFVYGTTYQFVLTTEIALLESIGSEDVEYAHLYFFHCKLVLDLTQQCRRTLMEQPLTTLNIHLFIKTMKAPLLTEVAEDPQQVSTVHLQLGLPLVFIVSQQATYEADRRTAEWVAWRLLGKAGVLLLLRDSLEVNIPQDANVVFKRAEEGVPVEFLVLHDVDLIISHVENNMHIEEIQEDEDNDMEGPDIDVQDDEVAETVFRDRKRKLPLELTVELTEETFNATVMASDSIVLFYAGWQAVSMAFLQSYIDVAVKLKGTSTMLLTRINCADWSDVCTKQNVTEFPIIKMYKKGENPVSYAGMLGTEDLLKFIQLNRISYPVNITSIQEAEEYLSGELYKDLILYSSVSVLGLFSPTMKTAKEDFSEAGNYLKGYVITGIYSEEDVLLLSTKYAASLPALLLARHTEGKIESIPLASTHAQDIVQIITDALLEMFPEITVENLPSYFRLQKPLLILFSDGTVNPQYKKAILTLVKQKYLDSFTPCWLNLKNTPVGRGILRAYFDPLPPLPLLVLVNLHSGGQVFAFPSDQAIIEENLVLWLKKLEAGLENHITILPAQEWKPPLPAYDFLSMIDAATSQRGTRKVPKCMKETDVQENDKEQHEDKSAVRKEPIETLRIKHWNRSNWFKEAEKSFRRDKELGCSKVN

SEQ ID NO: 70278 - protein, 26 aa, Homo sapiens
LKLFARLKSFLSLHMLTWMKLFPMTV

SEQ ID NO: 70279 - protein, 787 aa, Homo sapiens
TLLLCAVLLSLASASSDEEGSQDESLDSKTTLTSDESVKDHTTAGRVVAGQIFLDSEESELESSIQEEEDSLKSQEGESVTEDISFLESPNPENKDYEEPKKVRKPALTAIEGTAHGEPCHFPFLFLDKEYDECTSDGREDGRLWCATTYDYKADEKWGFCETEEEAAKRRQMQEAEMMYQTGMKILNGSNKKSQKREAYRYLQKAASMNHTKALERVSYALLFGDYLPQNIQAAREMFEKLTEEGSPKGQTALGFLYASGLGVNSSQAKALVYYTFGALGGNLIAHMVLGYRYWAGIGVLQSCESALTHYRLVANHVASDISLTGGSVVQRIRLPDEVENPGMNSGMLEEDLIQYYQFLAEKGDVQAQVGLGQLHLHGGRGVEQNHQRAFDYFNLAANAGNSHAMAFLGKMYSEGSDIVPQSNETALHYFKKAADMGNPVGQSGLGMAYLYGRGVQVNYDLALKYFQKAAEQGWVDGQLQLGSMYYNGIGVKRDYKQALKYFNLASQGGHILAFYNLAQMHASGTGVMRSCHTAVELFKNVCERGRWSERLMTAYNSYKDGDYNAAVIQYLLLAEQGYEVAQSNAAFILDQREASIVGENETYPRALLHWNRAASQGYTVARIKLGDYHFYGFGTDVDYETAFIHYRLASEQQHSAQAMFNLGYMHEKGLGIKQDIHLAKRFYDMAAEASPDAQVPVFLALCKLGVVYFLQYIRETNIRDMFTQLDMDQLLGPEWDLYLMTIIALLLGTVIAYRQRQHQDMPAPRPPGPRPAPPQQEGPPEQQPPQ

SEQ ID NO: 70280 - protein, 8 aa, Homo sapiens
ISPLLLLL

SEQ ID NO: 70281 - protein, 50 aa, Homo sapiens
TALKVVNLGIPTLLYGLGSWLFARVTETVHTSYGPITVYFLNKEDEGAMY

SEQ ID NO: 70282 - protein, 640 aa, Homo sapiens
VLALRVVAGLAAAALVAMLLEHYGLAGQPSPLPRPAPPRRPHPAPGPGDSNIFWGLQISDIHLSRFRDPGRAVDLEKFCSETIDIIQPALVLATGDLTDAKTKEQLGSRQHEVEWQTYQGILKKTRVMEKTKWLDIKGNHDAFNIPSLDSIKNYYRKYSAVRRDGSFHYVHSTPFGNYSFICVDATVNPGPKRPYNFFGILDKKKMEELLLLAKESSRSNHTIWFGHFTTSTILSPSPGIRSIMSSAIAYLCGHLHTLGGLMPVLHTRHFQGTLELEVGDWKDNRRYRIFAFDHDLFSFADLIFGKWPVVLITNPKSLLYSCGEHEPLERLLHSTHIRVLAFSLSSITSVTVKIDGVHLGQAVHVSGPIFVLKWNPRNYSSGTHNIEVIVQDSAGRSKSVHHIFSVQENNHLSFDPLASFILRTDHYIMARVLFVLIVLSQLTILIIFRYRGYPELKEPSGFINLTSFSLHVLSKINIFYYSVLLLTLYTVLGPWFFGEIIDGKFGCCFSFGIFVNGHFLQGSITFIIGILQLAFFNIPLMAYMCWSLLQRCFGHNFRSHLHQRKYLKIMPVHLLMLLLYIWQVYSCYFLYATYGTLAFLFSPLRTWLTLLTPVLIRYVWTLNSTKFGIFMVQLKSHLSS

SEQ ID NO: 70283 - protein, 20 aa, Homo sapiens
MCLQSFVFLMLCYFAPDFHL

SEQ ID NO: 70284 - protein, 71 aa, Homo sapiens
LNSWTQVMLLPWLPKLLELQLGLTCETWLQIGWEVLCPSIVEIAWVSIREECQLWIRSARPFLSPGLSIME

SEQ ID NO: 70285 - protein, 196 aa, Homo sapiens
LTTGLLKVSAVVLGCLIANRPDGNCQPATPKIPTQEMKNKPSQGDPFNNRVQDLISYVVNMGLIDKLCACFLSVQGPVDENPKMAIFLQHAAGLLHAMCTLCFAVTGRSYSIFDNNRQDPTGLTAALQATDLAGVLHMLYCVLFHGTILDPSTASPKENYTQNTIQVAIQSLRFFNSFAALHLPAFQVPSIGLYRC

SEQ ID NO: 70286 - protein, 635 aa, Homo sapiens
IAGVCGWLLLSGPCGVGLDLDSRLLGASAMRRSEVLAEESIVCLQKALNHLREIWELIGIPEDQRLQRTEVVKKHIKELLDMMIAEEESLKERLIKSISVCQKELNTLCSELHVEPFQEEGETTILQLEKDLRTQVELMRKQKKERKQELKLLQEQDQELCEILCMPHYDIDSASVPSLEELNQFRQHVTTLRETKASRREEFVSIKRQIILCMEALDHTPDTSFERDVVCEDEDAFCLSLENIATLQKLLRQLEMQKSQNEAVCEGLRTQIRELWDRLQIPEEEREAVATIMSGSKAKVRKALQLEVDRLEELKMQNMKKVIEAIRVELVQYWDQCFYSQEQRQAFAPFCAEDYTESLLQLHDAEIVRLKNYYEVHKELFEGVQKWEETWRLFLEFERKASDPNRFTNRGGNLLKEEKQRAKLQKMLPKLEEELKARIELWEQEHSKAFMVNGQKFMEYVAEQWEMHRLEKERAKQERQLKNKKQTETEMLYGSAPRTPSKRRGLAPNTPGKARKLNTTTMSNATANSSIRPIFGGTVYHSPVSRLPPSGSKPVAASTCSGKKTPRTGRHGANKENLELNGSILSGGYPGSAPLQRNFSINSVASTYSEFARELSKASKSDATSGILNSTNIQS

SEQ ID NO: 70287 - protein, 15 aa, Homo sapiens
IFLTMRSGNWMVFLC

SEQ ID NO: 70288 - protein, 61 aa, Homo sapiens
LALGSLRLLSLAGCPLLTTTGLSGLVQLQELEELELTNCPGATPELFKYFSQHLPRCLVIE

SEQ ID NO: 70289 - protein, 55 aa, Homo sapiens
LTSGTIAIWDLLLGQCTALLPPVSDQHWSFVKWSGTDSHLLAGQKDGNIFVYHYS

SEQ ID NO: 70290 - protein, 17 aa, Homo sapiens
LRMTAFSLTLTFLWQSS

SEQ ID NO: 70291 - protein, 10 aa, Homo sapiens
LYCWLYLFFF

SEQ ID NO: 70292 - protein, 8 aa, Homo sapiens
ITLLMFLL

SEQ ID NO: 70293 - protein, 13 aa, Homo sapiens
LASGVLLVFGILS

SEQ ID NO: 70294 - protein, 27 aa, Homo sapiens
LNLFFLYIFLLSAPCLALSFLIPLEFS

SEQ ID NO: 70295 - protein, 109 aa, Homo sapiens
LLILGLFFTGLLPFVPIREQFFEIPMPSIILKLKEPHTMSRSQKFLIWLSDLLLMRKALFDHLTARGIQVYIWVLNEEQEYKRAFDLGATGVMTDYPTKLRDFLHNFSA

SEQ ID NO: 70296 - protein, 41 aa, Homo sapiens
MKTVSVALVLCLNVGVDPPDVVKTTPCARLECWIGPVQAEP

SEQ ID NO: 70297 - protein, 17 aa, Homo sapiens
KSTSTYLLLLVSYVFSV

SEQ ID NO: 70298 - protein, 54 aa, Homo sapiens
IALLILAITIHNVPGFHLAARNSTVFFKALENSVASPERQNIAPVWQEVELMQH

SEQ ID NO: 70299 - protein, 34 aa, Homo sapiens
RNFVILLIFLYSVCLHTDGYLRASELSLPPSIIS

SEQ ID NO: 70300 - protein, 827 aa, Homo sapiens
KQLLFSLLVLTLLCDACQKVYLRVPSHLQAETLVGKVNLEECLKSASLIRSSDPAFRILEDGSIYTTHDLILSSERKSFSIFLSDGQRREQQEIKVVLSARENKSPKKRHTKDTALKRSKRRWAPIPASLMENSLGPFPQHVQQIQSDAAQNYTIFYSISGPGVDKEPFNLFYIEKDTGDIFCTRSIDREKYEQFALYGYATTADGYAPEYPLPLIIKIEDDNDNAPYFEHRVTIFTVPENCRSGTSVGKVTATDLDEPDTLHTRLKYKILQQIPDHPKHFSIHPDTGVITTTTPFLDREKCDTYQLIMEVRDMGGQPFGLFNTGTITISLEDENDNPPSFTETSYVTEVEENRIDVEILRMKVQDQDLPNTPHSKAVYKILQGNENGNFIISTDPNTNEGVLCVVKPLNYEVNRQVILQVGVINEAQFSKAASSQTPTMCTTTVTVKIIDSDEGPECHPPVKVIQSQDGFPAGQELLGYKALDPEISSGEGLRYQKLGDEDNWFEINQHTGDLRTLKVLDRESKFVKNNQYNISVVAVDAVGRSCTGTLVVHLDDYNDHAPQIDKEVTICQNNEDFAVLKPVDPDGPENGPPFQFFLDNSASKNWNIEEKDGKTAILRQRQNLDYNYYSVPIQIKDRHGLVATHMLTVRVCDCSTPSECRMKDKSTRDVRPNVILGRWAILAMVLGSVLLLCILFTCFCVTAKRTVKKCFPEDIAQQNLIVSNTEGPGEEVTEANIRLPMQTSNICDTSMSVGTVGGQGIKTQQSFEMVKGGYTLDSNKGGGHQTLESVKGVGQGDTGRYAYTDWQSFTQPRLGEESIRGHTLIKN

SEQ ID NO: 70301 - protein, 12 aa, Homo sapiens
LFNILSMHLLFY

SEQ ID NO: 70302 - protein, 20 aa, Homo sapiens
INIGLLLLAFPSPTEEGQLR

SEQ ID NO: 70303 - protein, 11 aa, Homo sapiens
MLIAMYFYTML

SEQ ID NO: 70304 - protein, 267 aa, Homo sapiens
IDHSAFIILLLTSNFDCRLSLHQVNQAMMSNLTRQGSPDCVIPFLPLESSPAQLSSDTASLLSGLVRLDEHSQIFARKVANTFKPHRLQARKAMWRKEQDTRALREQSQHLDGERMQAAALNAAYSAYLQSYLSYQAQMEQLQVAFGSHMSFGTGAPYGARMPFGGQVPLGAPPPFPTWPGCPQPPPLHAWQAGTPPPPSPQPAAFPQSLPFPQSPAFPTASPAPPQSPGLQPLIIHHAQMVQLGLNNHMWNQRGSQAPEDKTQEAE

SEQ ID NO: 70305 - protein, 168 aa, Homo sapiens
LVAGLVICLVVCIQRFAQAQQQLPLESLGWDVAELQLNHTGPQQDPRLYWQGGPALGRSFLHGPELDKGQLRIHRDGIYMVHIQVTLAICSSTTASRHHPTTLAVGICSPASRSISLLRLSFHQGCTIASQRLTPLARGDTLCTNLTGTLLPSRNTDETFFGVQWVRP

SEQ ID NO: 70306 - protein, 1412 aa, Homo sapiens
LLAFIFLLLTCLCCKRGDVGFKEFENPEGEDCSGEYTPPAEETSSSQSLPDVYILPLAEVSLPMPAPQPSHSDMTTPLGLSRQHLSYLQEIGSGWFGKVILGEIFSDYTPAQVVVKELRASAGPLEQRKFISEAQPYRSLQHPNVLQCLGLCVETLPFLLIMEFCQLGDLKRYLRAQRPPEGLSPELPPRDLRTLQRMGLEIARGLAHLHSHNYVHSDLALRNCLLTSDLTVRIGDYGLAHSNYKEDYYLTPERLWIPLRWAAPELLGELHGTFMVVDQSRESNIWSLGVTLWELFEFGAQPYRHLSDEEVLAFVVRQQHVKLARPRLKLPYADYWYDILQSCWRPPAQRPSASDLQLQLTYLLSERPPRPPPPPPPPRDGPFPWPWPPAHSAPRPGTLSSPFPLLDGFPGADPDDVLTVTESSRGLNLECLWEKARRGAGRGGGAPAWQPASAPPAPHANPSNPFYEALSTPSVLPVISARSPSVSSEYYIRLEEHGSPPEPLFPNDWDPLDPGVPAPQAPQAPSEVPQLVSETWASPLFPAPRPFPAQSSASGSFLLSGWDPEGRGAGETLAGDPAEVLGERGTAPWVEEEEEEEEGSSPGEDSSSLGGGPSRRGPLPCPLCSREGACSCLPLERGDAVAGWGGHPALGCPHPPEDDSSLRAERGSLADLPMAPPASAPPEFLDPLMGAAAPQYPGRGPPPAPPPPPPPPRAPADPAASPDPPSAVASPGSGLSSPGPKPGDSGYETETPFSPEGAFPGGGAAEEEGVPRPRAPPEPPDPGAPRPPPDPGPLPLPGPREKPTFVVQVSTEQLLMSLREDVTRNLLGEKGATARETGPRKAGRGPGNREKVPGLNRDPTVLGNGKQAPSLSLPVNGVTVLENGDQRAPGIEEKAAENGALGSPEREEKVLENGELTPPRREEKALENGELRSPEAGEKVLVNGGLTPPKSEDKVSENGGLRFPRNTERPPETGPWRAPGPWEKTPESWGPAPTIGEPAPETSLERAPAPSAVVSSRNGGETAPGPLGPAPKNGTLEPGTERRAPETGGAPRAPGAGRLDLGSGGRAPVGTGTAPGGGPGSGVDAKAGWVDNTRPQPPPPPLPPPPEAQPRRLEPAPPRARPEVAPEGEPGAPDSRAGGDTALSGDGDPPKPERKGPEMPRLFLDLGPPQGNSEQIKARLSRLSLALPPLTLTPFPGPGPRRPPWEGADAGAAGGEAGGAGAPGPAEEDGEDEDEDEEEDEEAAAPGAAAGPRGPGRARAAPVPVVVSSADADAARPLRGLLKSPRGADEPEDSELERKRKMVSFHGDVTVYLFDQETPTNELSVQAPPEGDTDPSTPPAPPTPPHPATPGDGFPSNDSGFGGSFEWAEDFPLLPPPGPPLCFSRFSVSPALETPGPPARAPDARPAGPVEN

SEQ ID NO: 70307 - protein, 79 aa, Homo sapiens
RSSKVVLGLSVLLTAATVAGVHVKQQWDQQRLRDGVIRDIERQIRKKENIRLLGEQIILTEQLEAEREKMLLAKGSQKS

SEQ ID NO: 70308 - protein, 12 aa, Homo sapiens
MKQVMLKYLFLF

SEQ ID NO: 70309 - protein, 354 aa, Homo sapiens
VTIVSGLLMLLLFLSELQYYLTTEVHPELYVDKSRGDKLKINIDVLFPHMPCAYLSIDAMDVAGEQQLDVEHNLFKQRLDKDGIPVSSEAERHELGKVEVTVFDPDSLDPDRCESCYGAEAEDIKCCNTCEDVREAYRRRGWAFKNPDTIEQCRREGFSQKMQEQKNEGCQVYGFLEVNKVAGNFHFAPGKSFQQSHVHVHDLQSFGLDNINMTHYIQHLSFGEDYPGIVNPLDHTNVTAPQASMMFQYFVKVVPTVYMKVDGEVLRTNQFSVTRHEKVANGLLGDQGLPGVFVLYELSPMMVKLTEKHRSFTHFLTGVCAIIGGMFTVAGLIDSLIYHSARAIQKKIDLGKTT

SEQ ID NO: 70310 - protein, 78 aa, Homo sapiens
LPWSLLLFSLMCETSAFYVPGVAPINFHQNDPVEIKAVKLTSSRTQLPYEYYSLPFCQPSKITYKAENLGSHEQREEV

SEQ ID NO: 70311 - protein, 33 aa, Homo sapiens
IGFEFTVLVALELALYLPENQVLPHYRRLTQQF

SEQ ID NO: 70312 - protein, 15 aa, Homo sapiens
LVVGFLLCLFLLMPP

SEQ ID NO: 70313 - protein, 393 aa, Homo sapiens
LLRVSVLCIWMSALFLGVGVRAEEAGARVQQNVPSGTDTGDPQSKPLGDWAAGTMDPESSIFIEDAIKYFKEKVSTQNLLLLLTDNEAWNGFVAAAELPRNEADELRKALDNLARQMIMKDKNWHDKGQQYRNWFLKEFPRLKSELEDNIRRLRALADGVQKVHKGTTIANVVSGSLSISSGILTLVGMGLAPFTEGGSLVLLEPGMELGITAALTGITSSTMDYGKKWWTQAQAHDLVIKSLDKLKEVREFLGENISNFLSLAGNTYQLTRGIGKDIRALRRARANLQSVPHASASRPRVTEPISAESGEQVERVNEPSILEMSRGVKLTDVAPVSFFLVLDVVYLVYESKHLHEGAKSETAEELKKVAQELEEKLNILNNNYKILQADQEL

SEQ ID NO: 70314 - protein, 13 aa, Homo sapiens
VFELLIIWIFFFF

SEQ ID NO: 70315 - protein, 176 aa, Homo sapiens
IAALSFWQKVRLAWGLCFLSDPISKDDVERCKQKDLLEQMMAEMIGEFPDLHRTIVSERDVYLTYMLRQAARRLELPRASDAEPRKCVPSVVVGVVGMGHVPGIEKNWSTDLNIQEIMTVPPPSVSGRVSRLAVKAAFFGLLGYSLYWMGRRTASLVLSLPAAQYCLQRVTEARHK

SEQ ID NO: 70316 - protein, 29 aa, Homo sapiens
IFLLFVKSLTFPLFFMYTLNCNSSSQIKH

SEQ ID NO: 70317 - protein, 94 aa, Homo sapiens
LQIIDLFKNIFQLVGLDLFVFPYRVVATAPGCGVIECIPDCTSRDQLGRQTDFGMYDYFTRQYGDESTLAFQQTLASCLKARRAAISAGNPTSS

SEQ ID NO: 70318 - protein, 15 aa, Homo sapiens
IFLTMRSGNWMVFLC

SEQ ID NO: 70319 - protein, 20 aa, Homo sapiens
KNLLYLYFGGTLAVCVWKCS

SEQ ID NO: 70320 - protein, 34 aa, Homo sapiens
IFCMFCHLWEIFLRFRLLMLLLGKTKKAERSQNI

SEQ ID NO: 70321 - protein, 13 aa, Homo sapiens
LVLALCLSLAWFS

SEQ ID NO: 70322 - protein, 55 aa, Homo sapiens
VTFILPVCPTFTIWNKSLMILSGLPAPDFIDYPERQECNCRPQESPYVSGMKTCH

SEQ ID NO: 70323 - protein, 37 aa, Homo sapiens
KSFLGWMLSAIFSTFLPFSSCAQPLSQLSIFCISTWH

SEQ ID NO: 70324 - protein, 55 aa, Homo sapiens
LFSIAGPVLLILVHASLRLRNLKNKIENKIESIGLKRTPMGLLLEALGQEQEAGS

SEQ ID NO: 70325 - protein, 308 aa, Homo sapiens
MLMFAVIVASSGLLLMIERGILAEMKPLPLHPPGREGTAWRGKAPKPGGLSLRAGDADLQVRQDVRNRTLRAVCGQPGMPRDPWDLPVGQRRTLLRHILVLAGVLDSVDVRLKMDHRSDLVFLADLRPEEIRYRLQHYFKFLFVREPLERLLSAYRNKFGEIREYQQRYGAEIVRRYRAGAGPSPAGDDVTFPEFLRYLVDEDPERMNEHWMPVYHLCQPCAVHYDFVGSYERLEADANQVLEWVRAPPHVRFPARQAWYRPASPESLHYHLCSAPRALLQDVLPKYILDFSLFAYPLPNVTKEACQQ

SEQ ID NO: 70326 - protein, 378 aa, Homo sapiens
MYRERLRTLLVIAVVMSLLNALSTSGGSISWNDFVHEMLAKGEVQRVQVVPESDVVEVYLHPGAVVFGRPRLALMYRMQVANIDKFEEKLRAAEDELNIEAKDRIPVSYKRTGFFGNALYSVGMTAVGLAILWYVFRLAGMTGREGGFSAFNQLKMARFTIVDGKMGKGVSFKDVAGMHEAKLEVREFVDYLKSPERFLQLGAKVPKGALLLGPPGCGKTLLAKAVATEAQVPFLAMAGPEFVEVIGGLGAARVRSLFKEARARAPCIVYIDEIDAVGKKRSTTMSGFSNTEEEQTLNQLLVEMDGMGTTDHVIVLASTNRADILDGALMRPGRLDRHVFIDLPTLQVRARIPASPTPPGPPPLALSGLASPLRHFLV

SEQ ID NO: 70327 - protein, 149 aa, Homo sapiens
MLCLGWIFLWLVAGERIKGFNISGCSTKKLLWTYSTRSEEEFVLFCDLPEPQKSHFCHRNRLSPKQVPEHLPFMGSNDLSDVQWYQQPSNGDPLEDIRKSYPHIIQDKCTLHFLTPGVNNSGSYICRPKMIKYDPNTFLSENISKSSII

SEQ ID NO: 70328 - protein, 415 aa, Homo sapiens
MTLGIYLQLFFLSIVSQPTFINSVLPISAALPSLDQKKRGGHKACCLLTPPPPPLFPPPFFRGGRSPGPPGLPGKTGPKGEKGELGRPGRKGRPGPPGVPGMPGPIGWPGPEGPRGEKGDLGMMGLPGSRGPMGSKGYPGSRGEKGSRGEKGDLGPKGEKGFPGFPGMLGQKGEMGPKGEPGIAGHRGPTGRPGKRGKQGQKGDSGVMGPPGKPGPSGQPGRPGPPGPPPAGQLIMGPKGERGFPGPPGRCLCGPTMNVNNPSYGESVYGPSSPRVPVIFVVNNQEELERLNTQNAIAFRRDQRSLYFKDSLGWLPIQLTPFYPVDYTADQHGTCGDGLLQPGEECDDGNSDVGDDCIRCHRAYCGDGHRHEGVEDCDGSDFGYLTCETYLPGSYGDLQCTQYCYIDSTPCRYFT

SEQ ID NO: 70329 - protein, 240 aa, Homo sapiens
MPGRSCVALVLLAAAVSCAVAQHAPPWTEDCRKSTYPPSGPTYRGAVPWYTINLDLPPYKRWHELMLDKAPVLKVIVNSLKNMINTFVPSGKIMQVVDEKLPGLLGNFPGPFEEEMKGIAAVTDIPLGEIISFNIFYELFTICTSIVAEDKKGHLIHGRNMDFGVFLGWNINNDTWVITEQLKPLTVNLDFQRNNKTVFKASSFAGYVGMLTGFKPVRSLLLHNYTGSLLSCYRYVKVEI

SEQ ID NO: 70330 - protein, 50 aa, Homo sapiens
MARGAALALLLFGLLGVLVAAPDGGFDLSDALPGEYQHHFLKSRQYFMLT

SEQ ID NO: 70331 - protein, 482 aa, Homo sapiens
MTFFSSVSLSWFLTLFISVLPIESAVNVVDCFFYDGIKAILQLGLAILDYNLDKLLTCKDDAEAVTALNRFFDNVTNKDSPLPSNVQQGSNVSDEKTSHTRVDITDLIRESNEKYGNIRYEDIHSMRCRNRLYVIQTLEETTKQNVLRVVSQDVKLSLQELDELYVIFKKELFLSCYWCLGCPVLKHHDPSLPYLEQYQIDCQQFRALYHLLSPWAHSANKDSLALWTFRLLDENSDCLINFKEFSSAIDIMYNGSFTEKLKLLFKLHIPPAYTEVKSKDASKGDELSKEELLYFSQLHVSKPANEKEAESAKHSPEKGKGKIDIQAYLSQWQDELFKKEENIKDLPRMNQSQFIQFSKTLYNLFHEDPEEESLYQAIAVVTSLLLRMEEVGRKLHSPTSSAKGFSGTVCGSGGPSEEKTGSHLEKDPCSFREEPQWSFAFEQILASLLNEPALVRFFEKPIDVKAKLENARISQLRSRTKM

SEQ ID NO: 70332 - protein, 71 aa, Homo sapiens
RIDAFCTCLWALLLGLHLAEQHLQAASPSWLDTLKFSTTSLCCLVGFTAAVATRKATGPRRFRPRRSEKQP

SEQ ID NO: 70333 - protein, 345 aa, Homo sapiens
RIDAFCTCLWALLLGLHLAEQHLQAASPSWLDTLKFSTTSLCCLVGFTAAVATRKATGPRRFRPRRFFPGDSAGLFPTSPSLAIPHPSVGGSPASLFIPSPPSFLPLANQQLFRSPRRTSPSSLPGRLSRALSLGTIPSLTRADSGYLFSGSRPPSQVSRSGEFPVSDYFSLLSGSCPSSPLPSPAPSVAGSVASSSGSLRHRRPLISPARLNLKGQKLLLFPSPPGEAPTTPSSSDEHSPHNGSLFTMEPPHVPRKPPLQDVKHALDLRSKLERGSACSNRSIKKEDDSSQSSTCVVDTTTRGCSEEAATWRGRFGPSLVRGLLAVSLAANALFTSVFLYQSLR

SEQ ID NO: 70334 - protein, 76 aa, Homo sapiens
IAFIFLIIKSYRKYHSKPQAPDPHSDPPAKLSSIPGESLTYASTTFKLSEEKSNHLAENHSADFDPIVYAQIKVTN

SEQ ID NO: 70335 - protein, 15 aa, Homo sapiens
IFFKITFIFFLLLSS

SEQ ID NO: 70336 - protein, 748 aa, Homo sapiens
LGLFLFQLLQLLLPTTTAGGGGQGPMPRVRYYAGDERRALSFFHQKGLQDFDTLLLSGDGNTLYVGAREAILALDIQDPGVPRLKNMIPWPASDRKKSECAFKKKSNETQCFNFIRVLVSYNVTHLYTCGTFAFSPACTFIELQDSYLLPISEDKVMEGKGQSPFDPAHKHTAVLVDGMLYSGTMNNFLGSEPILMRTLGSQPVLKTDNFLRWLHHDASFVAAIPSTQVVYFFFEETASEFDFFERLHTSRVARVCKNDVGGEKLLQKKWTTFLKAQLLCTQPGQLPFNVIRHAVLLPADSPTAPHIYAVFTSQWQVGGTRSSAVCAFSLLDIERVFKGKYKELNKETSRWTTYRGPETNPRPGSCSVGPSSDKALTFMKDHFLMDEQVVGTPLLVKSGVEYTRLAVETAQGLDGHSHLVMYLGTTTGSLHKAVVSGDSSAHLVEEIQLFPDPEPVRNLQLAPTQGAVFVGFSGGVWRVPRANCSVYESCVDCVLARDPHCAWDPESRTCCLLSAPNLNSWKQDMERGNPEWACASGPMSRSLRPQSRPQIIKEVLAVPNSILELPCPHLSALASYYWSHGPAAVPEASSTVYNGSLLLIVQDGVGGLYQCWATENGFSYPVISYWVDSQDQTLALDPELAGIPREHVKVPLTRVSGGAALAAQQSYWPHFVTVTVLFALVLSGALIILVASPLRALRARGKVQGCETLRPGEKAPLSREQHLQSPKECRTSASDVDADNNCLGTEVA

SEQ ID NO: 70337 - protein, 32 aa, Homo sapiens
LMFFCFFFKLYCSAMEDGVFFHDPLTLKFIFK

SEQ ID NO: 70338 - protein, 46 aa, Homo sapiens
VMLTWMWMGMTLWSMGSHNTQRLMSSPAQARSLVKPRRERHFGAQS

SEQ ID NO: 70339 - protein, 56 aa, Homo sapiens
IRVSTSAGCIIWLFQTVSEVFTSTIPAAAGTDETAAVAAAATARCTSTDCSFTTVQ

SEQ ID NO: 70340 - protein, 37 aa, Homo sapiens
VASLITLFHLFLFKLIYNEYCGPGAKPLFRSKEDPSV

SEQ ID NO: 70341 - protein, 65 aa, Homo sapiens
TILSAGNWLLLVSLLLKFEMLYLIGLGLGDAKDITVKGLEVVRRCSRVYLEAYTSVLTVGKEALG

SEQ ID NO: 70342 - protein, 44 aa, Homo sapiens
MSVSLLLFWMLLSVHLQFQKGPSAKRPMFIQQNAGAEGVPTVGS

SEQ ID NO: 70343 - protein, 17 aa, Homo sapiens
IFYIYMRRVSQLLIKLL

SEQ ID NO: 70344 - protein, 19 aa, Homo sapiens
IFSCIFWSFGHFSFLILKF

SEQ ID NO: 70345 - protein, 19 aa, Homo sapiens
IGCIVAFTLFHLLDMDLSP

SEQ ID NO: 70346 - protein, 28 aa, Homo sapiens
VLALVAIFIMSLNKRHSSGDGNSKLKSE

SEQ ID NO: 70347 - protein, 16 aa, Homo sapiens
ISSRTPLSFFFMLAVQ

SEQ ID NO: 70348 - protein, 16 aa, Homo sapiens
LIYSWTVLFAWTGKFF

SEQ ID NO: 70349 - protein, 121 aa, Homo sapiens
IFHSSLLLMSLAFYLAYGGAYDVMSSKHLCGDTNYAWPTAEIAVMGAKGAVEIIFKGHENVEAAQAEYIEKFANPFPAAVRGFVDDIIQPSSTRARICCDLDVLASKKVQRPWRKHANIPL

SEQ ID NO: 70350 - protein, 15 aa, Homo sapiens
MGSLSGLRLAAGWFM

SEQ ID NO: 70351 - protein, 574 aa, Homo sapiens
ISQRMTLLWCVVSLYFYGILQSDASERCDDWGLDTMRQIQVFEDEPARIKCPLFEHFLKFNYSTAHSAGLTLIWYWTRQDRDLEEPINFRLPENRISKEKDVLWFRPTLLNDTGNYTCMLRNTTYCSKVAFPLEVVQKDSCFNSPMKLPVHKLYIEYGIQRITCPNVDGYFPSSVKPTITWYMGCYKIQNFNNVIPEGMNLSFLIALISNNGNYTCVVTYPENGRTFHLTRTLTVKVVGSPKNAVPPVIHSPNDHVVYEKEPGEELLIPCTVYFSFLMDSRNEVWWTIDGKKPDDITIDVTINESISHSRTEDETRTQILSIKKVTSEDLKRSYVCHARSAKGEVAKAAKVKQKVPAPRYTVELACGFGATVLLVVILIVVYHVYWLEMVLFYRAHFGTDETILDGKEYDIYVSYARNAEEEEFVLLTLRGVLENEFGYKLCIFDRDSLPGGIVTDETLSFIQKSRRLLVVLSPNYVLQGTQALLELKAGLENMASRGNINVILVQYKAVKETKVKELKRAKTVLTVIKWKGEKSKYPQGRFWKQLQVAMPVKKSPRRSSSDEQGLSYSSLKNV

SEQ ID NO: 70352 - protein, 1383 aa, Homo sapiens
TILTLSRGLGYYILTLLKTTEVLAIMGNQLAGIAPSQILSVESYFSDIHDFEYDKSLGSTRFFKVARAKHREGLVVVKVFAIQDPTLPLTSYKQELEELKIRLNSAQNCLPFQKASEKASEKAAMLFRQYVRDNLYDRISTRPFLNNIEKRWIAFQILTAVDQAHKSGVRHGDIKTENVMVTSWNWVLLTDFASFKPTYLPEDNPADFNYFFDTSRRRTCYIAPERFVDGGMFATELEYMRDPSTPLVDLNSNQRTRGELKRAMDIFSAGCVIAELFTEGVPLFDLSQLLAYRNGHFFPEQVLNKIEDHSIRELVTQMIHREPDKRLEAEDYLKQQRGNAFPEIFYTFLQPYMAQFAKETFLSADERILVIRKDLGNIIHNLCGHDLPEKAEGEPKENGLVILVSVITSCLQTLKYCDSKLAALELILHLAPRLSVEILLDRITPYLLHFSNDSVPRVRAEALRTLTKVLALVKEVPRNDINIYPEYILPGIAHLAQDDATIVRLAYAENIALLAETALRFLELVQLKNLNMENDPNNEEIDEVTHPNGNYDTELQALHEMVQQKVVTLLSDPENIVKQTLMENGITRLCVFFGRQKANDVLLSHMITFLNDKNDWHLRGAFFDSIVGVAAYVGWQSSSILKPLLQQGLSDAEEFVIVKALYALTCMCQLGLLQKPHVYEFASDIAPFLCHPNLWIRYGAVGFITVVARQISTADVYCKLMPYLDPYITQPIIQIERKLVLLSVLKEPVSRSIFDYALRSKDITSLFRHLHMRQKKRNGSLPDCPPPEDPAIAQLLKKLLSQGMTEEEEDKLLALKDFMMKSNKAKANIVDQSHLHDSSQKGVIDLAALGITGRQVDLVKTKQEPDDKRARKHVKQDSNVNEEWKSMFGSLDPPNMPQALPKGSDQEVIQTGKPPRSESSAGICVPLSTSSQVPEVTTVQNKKPVIPVLSSTILPSTYQIRITTCKTELQQLIQQKREQCNAERIAKQMMENAEWESKPPPPGWRPKGLLVAHLHEHKSAVNRIRVSDEHSLFATCSNDGTVKIWNSQKMEGKTTTTRSILTYSRIGGRVKTLTFCQGSHYLAIASDNGAVQLLGIEASKLPKSPKIHPLQSRILDQKEDGCVVDMHHFNSGAQSVLAYATVNGSLVGWDLRSSSNAWTLKHDLKSGLITSFAVDIHQCWLCIGTSSGTMACWDMRFQLPISSHCHPSRARIRRLSMHPLYQSWVIAAVQGNNEVSMWDMETGDRRFTLWASSAPPLSELQPSPHSVHGIYCSPADGNPILLTAGSDMKIRFWDLAYPERSYVVAGSTSSPSVSYYRKIIEGTEVVQEIQNKQKVGPSDDTPRRGPESLPVGHHDIITDVATFQTTQGFIVTASRDGIVKVWK

SEQ ID NO: 70353 - protein, 13 aa, Homo sapiens
IMQAWVFFLTISA

SEQ ID NO: 70354 - protein, 17 aa, Homo sapiens
IAGSLLSITLILNLRTT

SEQ ID NO: 70355 - protein, 1591 aa, Homo sapiens
VNLLLGVFQVLLPCCRPGGAQGQAIEPLPNVVELWQAEEGELLLPTQGDSEEGLEEPSQEQSFSDKLFSGKGLHFQPSVLDFGIQFLGHPVAKILHAYNPSRDSEVVVNSVFAAAGHFHVPPVPCRVIPAMGKTSFRIIFLPTEEGSIESSLFINTSSYGVLSYHVSGIGTRRISTEGSAKQLPNAYFLLPKVQSIQLSQMQAETTNTSLLQVQLECSLHNKVCQQLKGCYLESDDVLRLQMSIMVTMENFSKEFEENTQHLLDHLSIVYVATDESETSDDSAVNMYILHSGNSLIWIQDIRHFSQRDALSLQFEPVLLPTSTTNFTKIASFTCKATSCDSGIIEDVKKTTHTPTLKACLFSSVAQGYFRMDSSATQFHIETHENTSGLWSIWYRNHFDRSVVLNDVFLSKETKHMLKILNFTGPLFLPPGCWNIFSLKLAVKDIAINLFTNVFLTTNIGAIFAIPLQIYSAPTKEGSLGFEVIAHCGMHYFMGKSKAGNPNWNGSLSLDQSTWNVDSELANKLYERWKKYKNGDVCKRNVLGTTRFAHLKKSKESESFVFFLPRLIAEPGLMLNFSATALRSRMIKYFVVQNPSSWPVSLQLLPLSLYPKPEALVHLLHRWFGTDMQMINFTTGEFQLTEACPYLGTHSEESRFGILHLHLQPLEMKRVGVVFTPADYGKVTSLILIRNNLTVIDMIGVEGFGARELLKVGGRLPGAGGSLRFKVPESTLMDCRRQLKDSKQILSITKNFKVENIGPLPITVSSLKINGYNCQGYGFEVLDCHQFSLDPNTSRDISIVFTPDFTSSWVIRDLSLVTAADLEFRFTLNVTLPHHLLPLCADVVPGPSWEESFWRLTVFFVSLSLLGVILIAFQQAQYILMEFMKTRQRQNASSSSQQNNGPMDVISPHSYKSNCKNFLDTYGPSDKGRGKNCLPVNTPQSRIQNAAKRSPATYGHSQKKHKCSVYYSKHKTSTAAASSTSTTTEEKQTSPLGSSLPAAKEDICTDAMRENWISLRYASGINVNLQKNLTLPKNLLNKEENTLKNTIVFSNPSSECSMKEGIQTCMFPKETDIKTSENTAEFKERELCPLKTSKKLPENHLPRNSPQYHQPDLPEISRKNNGNNQQVPVKNEVDHCENLKKVDTKPSSEKKIHKTSREDMFSEKQDIPFVEQEDPYRKKKLQEKREGNLQNLNWSKSRTCRKNKKRGVAPVSRPPEQSDLKLVCSDFERSELSSDINVRSWCIQESTREVCKADAEIASSLPAAQREAEGYYQKPEKKCVDKFCSDSSSDCGSSSGSVRASRGSWGSWSSTSSSDGDKKPMVDAQHFLPAGDSVSQNDFPSEAPISLNLSHNICNPMTVNSLPQYAEPSCPSLPAGPTGVEEDKGLYSPGDLWPTPPVCVTSSLNCTLENGVPCVIQESAPVHNSFIDWSATCEGQFSSAYCPLELNDYNAFPEENMNYANGFPCPADVQTDFIDHNSQSTWNTPPNMPAAWGHASFISSPPYLTSTRSLSPMSGLFGSIWAPQSDVYENCCPINPTTEHSTHMENQAVVCKEYYPGFNPFRAYMNLDIWTTTANRNANFPLSRDSSYCGNV

SEQ ID NO: 70356 - protein, 39 aa, Homo sapiens
ILLLLALVAILWKLGFFKRKYEKMTKNPDEIDETTELSS

SEQ ID NO: 70357 - protein, 54 aa, Homo sapiens
RLSEPLPAMLLLWVSVVAALALAVLAPGAGEQRRRAAKAPNVVLVVSDSFIPDD

SEQ ID NO: 70358 - protein, 544 aa, Homo sapiens
RLSEPLPAMLLLWVSVVAALALAVLAPGAGEQRRRAAKAPNVVLVVSDSFDGRLTFHPGSQVVKLPFINFMKTRGTSFLNAYTNSPICCPSRAAMWSGLFTHLTESWNNFKGLDPNYTTWMDVMERHGYRTQKFGKLDYTSGHHSISNRVEAWTRDVAFLLRQEGRPMVNLIRNRTKVRVMERDWQNTDKAVNWLRKEAINYTEPFVIYLGLNLPHPYPSPSSGENFGSSTFHTSLYWLEKVSHDAIKIPKWSPLSEMHPVDYYSSYTKNCTGRFTKKEIKNIRAFYYAMCAETDAMLGEIILALHQLDLLQKTIVIYSSDHGELAMEHRQFYKMSMYEASAHVPLLMMGPGIKAGLQVSNVVSLVDIYPTMLDIAGIPLPQNLSGYSLLPLSSETFKNEHKVKNLHPPWILSEFHGCNVNASTYMLRTNHWKYIAYSDGASILPQLFDLSSDPDELTNVAVKFPEITYSLDQKLHSIINYPKVSASVHQYNKEQFIKWKQSIGQNYSNVIANLRWHQDWQKEPRKYENAIDQWLKTHMNPRAV

SEQ ID NO: 70359 - protein, 84 aa, Homo sapiens
IKSQGQSHVYALYIVALCLSTLNSCIDPFVYYFVSHDFRDHAKNALLCRSVRTVKQMQVSLTSKKHSRKSSSYSSSSTTVKTSY

SEQ ID NO: 70360 - protein, 308 aa, Homo sapiens
RLIPRTMCAERLGQFMTLALVLATFDPARGTDATNPPEGPQDRSSQQKGRLSLQNTAEIQHCLVNAGDVGCGVFECFENNSCEIRGLHGICMTFLHNAGKFDAQGKSFIKDALKCKAHALRHRFGCISRKCPAIREMVSQLQRECYLKHDLCAAAQENTRVIVEMIHFKDLLLHEPYVDLVNLLLTCGEEVKEAITHSVQVQCEQNWGSLCSILSFCTSAIQKPPTAPPERQPQVDRTKLSRAHHGEAGHHLPEPSSRETGRGAKGERGSKSHPNAHARGRVGGLGAQGPSGSSEWEDEQSEYSDIRR

SEQ ID NO: 70361 - protein, 35 aa, Homo sapiens
KESAKPLLMMWRLTAIFLFQLILPRCISQKTLIHR

SEQ ID NO: 70362 - protein, 31 aa, Homo sapiens
LLVFIFRVWNGLTWPIYFPVSTKEGLPGTTN

SEQ ID NO: 70363 - protein, 48 aa, Homo sapiens
VVLLLLSHGARCFLITWLPPRPLCSCLLFGCRRCCLWPPAFCCYPESC

SEQ ID NO: 70364 - protein, 16 aa, Homo sapiens
VGPLFLHLMIGWFSNW

SEQ ID NO: 70365 - protein, 22 aa, Homo sapiens
RKWSIGMKWLLVAAWRTPAALL

SEQ ID NO: 70366 - protein, 34 aa, Homo sapiens
LQLLCRFFVTFFSQVFQLCACSLESPVTTEILKV

SEQ ID NO: 70367 - protein, 723 aa, Homo sapiens
IIINFCCCLINVKMSRSPDAKEDPVECPLCMEPLEIDDINFFPCTCGYQICRFCWHRIRTDENGLCPACRKPYPEDPAVYKPLSQEELQRIKNEKKQKQNERKQKISENRKHLASVRVVQKNLVFVVGLSQRLADPEVLKRPEYFGKFGKIHKVVINNSTSYAGSQGPSASAYVTYIRSEDALRAIQCVNNVVVDGRTLKASLGTTKYCSYFLKNMQCPKPDCMYLHELGDEAASFTKEEMQAGKHQEYEQKLLQELYKLNPNFLQLSTGSVDKNKNKVTPLQSPIDKPSDSLSIGNGDNSQQISNSDTPSPPPGLSKSNPVIPISSSNHSARSPFEGAVTESQSLFSDNFRHPNPIPSGLPPFPSSPQTSSDWPTAPEPQSLFTSETIPVSSSTDWQAAFGFGSSKQPEDDLGFDPFDVTRKALADLIEKELSVQDQPSLSPTSLQNSSSHTTTAKGPGSGFLHPAAATNANSLNSTFSVLPQRFPQFQQHRAVYNSFSFPGQAARYPWMAFPRNSIMHLNHTANPTSNSNFLDLNLPPQHNTGLGGIPVADNSSSVESLNMKEWQDGLRALLPNININFGGLPNSSSPSNANHSAPTSNTATTDSLSWDSPGSWTDPAIITGIPASSGNSLDSLQDDNPPHWLKSLQALTEMDGPSAAPSQTHHSAPFSTQIPLHRASWNPYPPPSNPSSFHSPPPGFQTAFRPPSKTPTDLLQSSTLDRH

SEQ ID NO: 70368 - protein, 14 aa, Homo sapiens
VGGFNFSFFLVIFF

SEQ ID NO: 70369 - protein, 63 aa, Homo sapiens
LSSIFFLILTFFPHPKLLIELARHQYELVTFPDNADMWGLGNERAPWDRGIWKCHPMAQSGNR

SEQ ID NO: 70370 - protein, 15 aa, Homo sapiens
KYFFPVKKIIYLLLF

SEQ ID NO: 70371 - protein, 20 aa, Homo sapiens
LVQFKFILPLALGGLGPTSE

SEQ ID NO: 70372 - protein, 16 aa, Homo sapiens
LTDFTLIYSMLFVVSC

SEQ ID NO: 70373 - protein, 55 aa, Homo sapiens
IWLIFFYWLFHSCLNAVAELMQFGDREFYRDWWNSESVTYFWQNWNIPVHKWCIR

SEQ ID NO: 70374 - protein, 17 aa, Homo sapiens
ILSFLGLVAGALALGLW

SEQ ID NO: 70375 - protein, 10 aa, Homo sapiens
LYGLDLFLLF

SEQ ID NO: 70376 - protein, 81 aa, Homo sapiens
LSLFSLVASLLLVSHLYLVASNTTTWEFISSHRIAYLRQRPSNPFDRGLTRNLAHFFCGWPSGSWETLWAEEEEEGSSPAV

SEQ ID NO: 70377 - protein, 21 aa, Homo sapiens
RSLWWLLLCVINSGKFHLLHI

SEQ ID NO: 70378 - protein, 137 aa, Homo sapiens
IDICPANWKRIVLGAILLASKVWDDQAVWNVDYCQILKDITVEDMNELERQFLELLQFNINVPSSVYAKYYFDLRSLAEANNLSFPLEPLSRERAHKLEAISRLCEDKYKDLRRSARKRSASADNLTLPRWSPAIIS

SEQ ID NO: 70379 - protein, 11 aa, Homo sapiens
VMSRRLLALML

SEQ ID NO: 70380 - protein, 18 aa, Homo sapiens
VCAVLHLGLLLAAWPQRG

SEQ ID NO: 70381 - protein, 13 aa, Homo sapiens
MKCACSSALLFLV

SEQ ID NO: 70382 - protein, 68 aa, Homo sapiens
IIAFLAGLSYSKIRTRGSNYRFEGLGPTVIVCPTTVMHQWVKEFHTWWPPFRVAILHETGSYTHKKVQ

SEQ ID NO: 70383 - protein, 17 aa, Homo sapiens
IIMNLMKMEMIILSMTL

SEQ ID NO: 70384 - protein, 30 aa, Homo sapiens
KLRLWMTFSLAAMSCWLSLVPSSLEASSWF

SEQ ID NO: 70385 - protein, 12 aa, Homo sapiens
LKIFLLILKYSA

SEQ ID NO: 70386 - protein, 35 aa, Homo sapiens
RLGITPATTWVSLSLLAWSSPTKPRILRSPACQAS

SEQ ID NO: 70387 - protein, 151 aa, Homo sapiens
IVLMATVLKTIVLIPFLEQNNFSPNTRTQKARHCGHCPEEWITYSNSCYYIGKERRTWEESLLACTSKNSSLLSIDNEEEMKFLASILPSSWIGVFRNSSHHPWVTINGLAFKHKIKDSDNAELNCAVLQVNRLKSAQCGSSMIYHCKHKL

SEQ ID NO: 70388 - protein, 22 aa, Homo sapiens
RVLNMPRTQIPALLLLVLHGHL

SEQ ID NO: 70389 - protein, 523 aa, Homo sapiens
IMSLRVHTLPTLLGAVVRPGCRELLCLLMITVTVGPGASGVCPTACICATDIVSCTNKNLSKVPGNLFRLIKRLDLSYNRIGLLDSEWIPVSFAKLNTLILRHNNITSISTGSFSTTPNLKCLDLSSNKLKTVKNAVFQELKVLEVLLLYNNHISYLDPSAFGGLSQLQKLYLSGNFLTQFPMDLYVGRFKLAELMFLDVSYNRIPSMPMHHINLVPGKQLRGIYLHGNPFVCDCSLYSLLVFWYRRHFSSVMDFKNDYTCRLWSDSRHSRQVLLLQDSFMNCSDSIINGSFRALGFIHEAQVGERLMVHCDSKTGNANTDFIWVGPDNRLLEPDKEMENFYVFHNGSLVIESPRFEDAGVYSCIAMNKQRLLNETVDVTINVSNFTVSRSHAHEAFNTAFTTLAACVASIVLVLLYLYLTPCPCKCKTKRQKNMLHQSNAHSSILSPGPASDASADERKAGAGKRVVFLEPLKDTAAGQNGKVRLFPSEAVIAEGILKSTRGKSDSDSVNSVFSDTPFVAST

SEQ ID NO: 70390 - protein, 11 aa, Homo sapiens
ISLLLLGHIYA

SEQ ID NO: 70391 - protein, 566 aa, Homo sapiens
LLLAFLTVAYIFVELLVSTFHASAGAGRARELGSRRLSDLQKNTEDLSRPLYKKPPADSRALGEWGKASKLQLNEDELKQQEELIERYAINIYLSDRISLHRHIEDKRMYECKSQKFNYRTLPTTSVIIAFYNEAWSTLLRTIHSVLETSPAVLLKEIILVDDLSDRVYLKTQLETYISNLDRVRLIRTNKREGLVRARLIGATFATGDVLTFLDCHCECNSGWLEPLLERIGRDETAVVCPVIDTIDWNTFEFYMQIGEPMIGGFDWRLTFQWHSVPKQERDRRISRIDPIRSPTMAGGLFAVSKKYFQYLGTYDTGMEVWGGENLELSFRVWQCGGKLEIHPCSHVGHVFPKRAPYARPNFLQNTARAAEVWMDEYKEHFYNRNPPARKEAYGDISERKLLRERLRCKSFDWYLKNVFPNLHVPEDRPGWHGAIRSRGISSECLDYNSPDNNPTGANLSLFGCHGQGGNQFFEYTSNKEIRFNSVTELCAEVPEQKNYVGMQNCPKDGFPVPANIIWHFKEDGTIFHPHSGLCLSAYRTPEGRPDVQMRTCDALDKNQIWSFEK

SEQ ID NO: 70392 - protein, 920 aa, Homo sapiens
LGASVLLIAVRWLVRRLGPRPGGLGRSGTPVPPPSAAAAPASGEMTMDALLARLKLLNPDDLREEIVKAGLKCGPITSTTRFIFEKKLAQALLEQGGRLSSFYHHEAGVTALSQDPQRILKPAEGNPTDQAGFSEDRDFGYSVGLNPPEEEAVTSKTCSVPPSDTDTYRAGATASKEPPLYYGVCPVYEDVPARNERIYVYENKKEALQAVKMIKGSRFKAFSTREDAEKFARGICDYFPSPSKTSLPLSPVKTAPLFSNDRLKDGLCLSESETVNKERANSYKNPRTQDLTAKLRKAVEKGEEDTFSDLIWSNPRYLIGSGDNPTIVQEGCRYNVMHVAAKENQASICQLTLDVLENPDFMRLMYPDDDEAMLQKRIRYVVDLYLNTPDKMGYDTPLHFACKFGNADVVNVLSSHHLIVKNSRNKYDKTPEDVICERSKNKSVELKERIREYLKGHYYVPLLRAEETSSPVIGELWSPDQTAEASHVSRYGGSPRDPVLTLRAFAGPLSPAKAEDFRKLWKTPPREKAGFLHHVKKSDPERGFERVGRELAHELGYPWVEYWEFLGCFVDLSSQEGLQRLEEYLTQQEIGKKAQQETGEREASCRDKATTSGSNSISVRAFLDEDDMSLEEIKNRQNAARNNSPPTVGAFGHTRCSAFPLEQEADLIEAAEPGGPHSSRNGLCHPLNHSRTLAGKRPKAPRGEEAHLPPVSDLTVEFDKLNLQNIGRSVSKTPDESTKTKDQILTSRINAVERDLLEPSPADQLGNGHRRTESEMSARIAKMSLSPSSPRHEDQLEVTREPARRLFLFGEEPSKLDQDVLAALECADVDPHQFPAVHRWKSAVLCYSPSDRQSWPSPAVKGRFKSQLPDLSGPHSYSPGRNSVAGSNPAKPGLGSPGRYSPVHGSQLRRMARLAELAAL

SEQ ID NO: 70393 - protein, 18 aa, Homo sapiens
IHFTKMPIENTFSFLLLC

SEQ ID NO: 70394 - protein, 8 aa, Homo sapiens
LIVWSMFF

SEQ ID NO: 70395 - protein, 202 aa, Homo sapiens
KQAKLSDLQNAAAGSFASAFAALVLCPTELVKCRLQTMYEMETSGKIAKSQNTVWSVIKSILRKDGPLGFYHGLSSTLLREVPGYFFFFGGYELSRSFFASGRSKDELGPVPLMLSGGVGGICLWLAVYPVDCIKSRIQVLSMSGKQAGFIRTFINVVKNEGITALYSGLKPTMIRAFPANGALFLAYEYSRKLMMNQLEAY

SEQ ID NO: 70396 - protein, 16 aa, Homo sapiens
RLMPVPSMLAMYVLGL

SEQ ID NO: 70397 - protein, 17 aa, Homo sapiens
KNSMTWITICFPLFTSL

SEQ ID NO: 70398 - protein, 34 aa, Homo sapiens
TAPRWMFGQLAVSLLSCCQECLCGQENRMWISCI

SEQ ID NO: 70399 - protein, 11 aa, Homo sapiens
IFYLILMAMWC

SEQ ID NO: 70400 - protein, 20 aa, Homo sapiens
ITELHSFLILLLILAPNKTG

SEQ ID NO: 70401 - protein, 8 aa, Homo sapiens
IALIMLAA

SEQ ID NO: 70402 - protein, 10 aa, Homo sapiens
RVSSFGLLYF

SEQ ID NO: 70403 - protein, 227 aa, Homo sapiens
TKWLLFLVPAMSCAGAAAAPRLWRLRPGARRSLSAYGRRTSVRFRSSGMTLDNISRAAVDRIIRVDHAGEYGANRIYAGQMAVLGRTSVGPVIQKMWDQEKDHLKKFNELMVTFRVRPTVLMPLWNVLGFALGAGTALLGKEGAMACTVAVEESIAHHYNNQIRTLMEEDPEKYEELLQLIKKFRDEELEHHDIGLDHDAELAPAYAVLKSIIQAGCRVAIYLSERL

SEQ ID NO: 70404 - protein, 36 aa, Homo sapiens
LKVSHLFAFMEWLSFLHCLTLRKERKCNKKSRKHLM

SEQ ID NO: 70405 - protein, 31 aa, Homo sapiens
ITLLSFLIEPLALLLICLLPIASLSHSDKCL

SEQ ID NO: 70406 - protein, 27 aa, Homo sapiens
IQDFLFFATILTPLLHSFFSVKYVNNN

SEQ ID NO: 70407 - protein, 16 aa, Homo sapiens
VLMIETVIAFGLCFSL

SEQ ID NO: 70408 - protein, 45 aa, Homo sapiens
LLLGAGLLLGAYVLVYYNLVKAPPCGGMGNLRGRTAVVTGECGGG

SEQ ID NO: 70409 - protein, 240 aa, Homo sapiens
LLRVNHIGPFLLTHLLLPCLKACAPSRVVVVASAAHCRGRLDFKRLDRPVVGWRQELRAYADTKLANVLFARELANQLEATGVTCYAAHPGPVNSELFLRHVPGWLRPLLRPLAWLVLRAPRGGAQTPLYCALQEGIEPLSGRYFANCHVEEVPPAARDDRAAHRLWEASKRLAGLGPGEDAEPDEDPQSEDSEAPSSLSTPHPEEPTVSQPYPSPQSSPDLSKMTHRIQAKVEPEIQLS

SEQ ID NO: 70410 - protein, 16 aa, Homo sapiens
ITVSNILPPLFWFCWL

SEQ ID NO: 70411 - protein, 30 aa, Homo sapiens
IAWLTAGLVSVCCCTLWRFSLELLPEKAPL

SEQ ID NO: 70412 - protein, 14 aa, Homo sapiens
IVLVFLPKITAGLL

SEQ ID NO: 70413 - protein, 11 aa, Homo sapiens
LIFFFFFGYYN

SEQ ID NO: 70414 - protein, 22 aa, Homo sapiens
LLLALFCVAVSVVWGVFRNEDQ

SEQ ID NO: 70415 - protein, 21 aa, Homo sapiens
IMRYSVPILILLYLCYKNQKS

SEQ ID NO: 70416 - protein, 113 aa, Homo sapiens
LVKTVVIILGAFVVCWTPGQVVLLLDGLGCESCNVLAVEKYFLLLAEANSLVNAAVYSCRDAEMRRTFRRLLCCACLRQSTRESVHYTSSAQGGASTRIMLPENGHPLMDSTL

SEQ ID NO: 70417 - protein, 19 aa, Homo sapiens
VTLTFFIIFVDFCFWKNPS

SEQ ID NO: 70418 - protein, 18 aa, Homo sapiens
MLLIFLTMRSGNWMVFLC

SEQ ID NO: 70419 - protein, 16 aa, Homo sapiens
LWILVIISSGSLVMAG

SEQ ID NO: 70420 - protein, 67 aa, Homo sapiens
VRALNLLFGALAIFHLAYLGSLFDVDVDDTTEEQGYGMAYTVHKWSELSWASHWVTFGCWIFYRLIG

SEQ ID NO: 70421 - protein, 17 aa, Homo sapiens
ISIVLKLFVLDQICLMS

SEQ ID NO: 70422 - protein, 50 aa, Homo sapiens
VKISGKSIGWLVHLSVWSVAVFLPDQMSRLVSEGQCEKKIVSELEKLLED

SEQ ID NO: 70423 - protein, 668 aa, Homo sapiens
MIWEYSVLIIVMACMEYEMGKEAEKRKSDYIIRTLKVKFNSETRTIYQFHYKNWPDHDVPSSIDPILELIWDVRCYQEDDSVPICIHCSAGCGRTGVICAIDYTWMLLKDGIIPENFSVFSLIREMRTQRPSLVQTQEQYELVYNAVLELFKRQMDVIRDKHSGTESQAKHCIPEKNHTLQADSYSPNLPKSTTKAAKMMNQQRTKMEIKESSSFDFRTSEISAKEELVLHPAKSSTSFDFLELNYSFDKNADTTMKWQTKAFPIVGEPLQKHQSLDLGSLLFEGCSNSKPVNAAGRYFNSKVPITRTKSTPFELIQQRETKEVDSKENFSYLESQPHDSCFVEMQAQKVMHVSSAELNYSLPYDSKHQIRNASNVKHHDSSALGVYSYIPLVENPYFSSWPPSGTSSKMSLDLPEKQDGTVFPSSLLPTSSTSLFSYYNSHDSLSLNSPTNISSLLNQESAVLATAPRIDDEIPPPLPVWTPESFIVVEEAGEFSPNVPKSLSSAVKVKIGTSLEWGGTSEPKKFDDSVILRPSKSVKLRSPKSELHQDRSSPPPPLPERTLESFFLADEDCMQAQSIETYSTSYPDTMENSTSSKQTLKTPGKSFTRSKSLKILRNMKKSICNSCPPNKPAESVQSNNSSSFLNFGFANRFSKPKGPRNPPPTWNI

SEQ ID NO: 70424 - protein, 210 aa, Homo sapiens
MAFLLPLIIVLMVKHSDSRTHSLRYFRLGVSDPIHGVPEFISVGYVDSHPITTYDSVTRQKEPRAPWMAENLAPDHWERYTQLLRGWQQMFKVELKRLQRHYNHSGSHTYQRMIGCELLEDGSTTGFLQYAYDGQDFLIFNKDTLSWLAVDNVAHTIKQAWEANQHELLYQKNWLEEECIAWLKRFLEYGKDTLQRTEQNGAIYLPTPDR

SEQ ID NO: 70425 - protein, 66 aa, Homo sapiens
MRFWKLILLTWLLQKILLQLMSLELADLPLKMKDVHLNWKCHWRANVHHFPRLYVSSGKMLMLSVG

SEQ ID NO: 70426 - protein, 166 aa, Homo sapiens
MAGPPRLLLLPLLLALARGLPGALAAQEVQQSPHCTTVPVGASVNITCSTSGGLRGIYLRQLGPQPQDIIYYEDGVVPTTDRRFRGRIDFSGSQDNLTITMHRLQLSDTGTYTCQAITEVNVYGSGTLVLVTGRECAHPRPPSQPQLLARLCSPSPCRGTLPPTCA

SEQ ID NO: 70427 - protein, 207 aa, Homo sapiens [sequence omitted]

SEQ ID NO: 70428 - protein, 448 aa, Homo sapiens
MLGNLWNTGLFCLFLVFELLRQNMQHEPAFDSSSEEEEEEVRVVPVTSYNWLTDFPSQEALDSFYKHYVQNAIRDLPCTCEFVESFVDDLIEACRVLSRQEAHPQLEDCLGIGAAFEKWGTLHETQKFDILVPIVPPQGTMFVLEMRDPALGRRCGCVLVESECVCKREKLLGDVLCLVHHHRDPSAVLGKCSSSIKAALCTGFHLDVCKTVQWFRNMMGNAWALVAHKYDFKLSLPPSTTSCKLRLDYRSGRFLSIHLVLGVQREDTLVYLVSQAPDQEQLTSVDWPESFVACEHLFLKLVGRFAPENTCHLKCLQIILSLRQHQSLPHGASRPILTSYHFKTALMHLLLRLPLTDWAHNMLSQRLQDILWFLGRGLQQRSLHHFLIGNNFLPLTIPIPKTFRNAEPVNLFQHLVLNPKAHSQAVEEFQNLLTQVKTLPHAPLAAAP

SEQ ID NO: 70429 - protein, 576 aa, Homo sapiens
MVFLATLGLWDVFFGFEENKCSMSYMFEYPEYQKIELPKKLAKRYPAYELYLYGEGSYAEEHKILPLTGIPVLFLPGNAGSYKQVRSIGSIALRKAEDIDFKYHFDFFSVNFNEELVALYGGSLQKQTKFVHECIKTILKLYKGQEFAPKSVAIIGHSMGGLVARALLTLKNFKHDLINLLITQATPHVAPVMPLDRFITDFYTTVNNYWILNARHINLTTLSVAGGFRDYQVRSGLTFLPKLSHHTSALSVVSSAVPKTWVSTDHLSIVWCKQLQLTTVRAFFDLIDADTKQITQNSKKKLSVLYHHFIRHPSKHFEENPAIISDLTGTSMWVLVKVSKWTYVAYNESEKIYFTFPLENHRKIYTHVYCQSTMLDTNSWIFACINSTSMCLQGVDLSWKAELLPTIKYLTLRLQDYPSLSHLVVYVPSVRGSKFVVDCEFFKKEKRYIQLPVTHLFSFGLSSRKVVLNTNGLYYNLELLNFGQIYQAFKINVVSKCSAVKEEITSIYRLHIPWSYEDSLTIAQAPSSTEISLKLHIAQPENNTHVALFKMYTSSDCRYEVTVKTSFSQILGQVVA

SEQ ID NO: 70430 - protein, 1378 aa, Homo sapiens
MTFGNYVLFNLLVAILVEGFQAEGDANRSYSDEDQSSSNIEEFDKLQEGLDSSGDPKLCPIPMTPNGHLDPSLPLGGHLGPAGAAGPAPRLSLQPDPMLVALGSRKSSVMSLGRMSYDQRSLSSSRSSYYGPWGRSAAWASRRSSWNSLKHKPPSAEHESLLSAERGGGARVCEVAADEGPPRAAPLHTPHAHHIHHGPHLAHRHRHHRRTLSLDNRDSVDLAELVPAVGAHPRAAWRAAGPAPGHEDCNGRMPSIAKDVFTKMGDRGDRGEDEEEIDYTLCFRVRKMIDVYKPDWCEVREDWSVYLFSPENRFRVLCQTIIAHKLFDYVVLAFIFLNCITIALERPQIEAGSTERIFLTVSNYIFTAIFVGEMTLKVVSLGLYFGEQAYLRSSWNVLDGFLVFVSIIDIVVSLASAGGAKILGVLRVLRLLRTLRPLRVISRAPGLKLVVETLISSLKPIGNIVLICCAFFIIFGILGVQLFKGKFYHCLGVDTRNITNRSDCMAANYRWVHHKYNFDNLGQALMSLFVLASKDGWVNIMYNGLDAVAVDQQPVTNHNPWMLLYFISFLLIVSFFVLNMFVGVVVENFHKCRQHQEAEEARRREEKRLRRLEKKRRKAQRLPYYATYCHTRLLIHSMCTSHYLDIFITFIICLNVVTMSLEHYNQPTSLETALKYCNYMFTTVFVLEAVLKLVAFGLRRFFKDRWNQLDLAIVLLSVMGITLEEIEINAALPINPTIIRIMRVLRIARVLKLLKMATGMRALLDTVVQALPQVGNLGLLFMLLFFIYAALGVELFGKLVCNDENPCEGMSRHATFENFGMAFLTLFQVSTGDNWNGIMKDTLRDCTHDERSCLSSLQFVSPLYFVSFVLTAQFVLINVVVAVLMKHLDDSNKEAQEDAEMDAELELEMAHGLGPGPRLPTGSPGAPGRGPGGAGGGGDTEGGLCRRCYSPAQENLWLDSVSLIIKDSLEGELTIIDNLSGSIFHHYSSPAGCKKCHHDKQEVQLAETEAFSLNSDRSSSILLGDDLSLEDPTACPPGRKDSKGELDPPEPMRVGDLGECFFPLSSTAVSPDPENFLCEMEEIPFNPVRSWLKHDSSQAPPSPFSPDASSPLLPMPAEFFHPAVSASQKGPEKGTGTGTLPKIALQGSWASLRSPRVNCTLLRQATGSDTSLDASPSSSAGSLQTTLEDSLTLSDSPRRALGPPAPAPGPRAGLSPAARRRLSLRGRGLFSLRGLRAHQRSHSSGGSTSPGCTHHDSMDPSDEEGRGGAGGGGAGSEHSETLSSLSLTSLFCPPPPPPAPGLTPARKFSSTSSLAAPGRPHAAALAHGLARSPSWAADRSKDPPGRAPLPMGLGPLAPPPQPLPGELEPGDAASKRKR

SEQ ID NO: 70431 - protein, 136 aa, Homo sapiens
MVIVGLLVGLNVLDANLCLKGEDLDSQVGVIDFSLYLKDVQDLDGGKEHERITDVLDQKNYVEELNRHLSCTVGDLQTKIDGLEKTNSKLQEELSAATDRICSLQEEQQQLREQNELIRERSEKSVESLAVTQAGM

SEQ ID NO: 70432 - protein, 285 aa, Homo sapiens [sequence omitted]

SEQ ID NO: 70433 - protein, 266 aa, Homo sapiens
MRKLWLTYSSQTTAILGALLGSCCPQLQVLEVSTGINRNSIPLQLPVEALQKGCPQLQVLRLLNLMWLPKPPGRGVAPGPGFPSLEELCLASSTCNFVSNEVLGRLLHGSPNLRLLDLRGCARITPAGLQDLPCRELEQLHLGLYGTSDRLTLAKEGSPFLTQKWCHTLRELDLSGQGFSEKDLEQALAAFLSTPGGSHPALCSLNLRGTRVTPSTVSSVISGCPGLLYLNLESCRCLPRGLKRAYRGLEEVQWCLEQLLTSPSPS

SEQ ID NO: 70434 - protein, 16 aa, Homo sapiens
LFTQFMGVVMFITLLG

SEQ ID NO: 70435 - protein, 45 aa, Homo sapiens
IYGACVVFTLGMFSAGLSDLRHMRMTRSVDNVQFLPFLTTEVKLR

SEQ ID NO: 70436 - protein, 110 aa, Homo sapiens
ILALLGICSLTAYIVEGVGSEVSDKRTCVSLTTQRLPVSRIKTYTITEGSLRAVIFITKRGLKVCADPQATWVRDVVRSMDRKSNTRNNMIQTKPTGTQQSTNTAVTLTG

SEQ ID NO: 70437 - protein, 21 aa, Homo sapiens
IVGFAAFAYTVKYVLRSIAQE

SEQ ID NO: 70438 - protein, 337 aa, Homo sapiens
VSVLVILISIVIFCLETLPEFRDEKDYPASTSQDSFEAAGNSTSGSRAGASSFSDPFFVVETLCIIWFSFELLVRFFACPSKATFSRNIMNLIDIVAIIPYFITLGTELAERQGNGQQAMSLAILRVIRLVRVFRIFKLSRHSKGLQILGQTLKASMRELGLLIFFLFIGVILFSSAVYFAEADDPTSGFSSIPDAFWWAVVTMTTVGYGDMHPVTIGGKIVGSLCAIAGVLTIALPVPVIVSNFNYFYHRETEGEEQSQYMHVGSCQHLSSSAEELRKARSNSTLSKSEYMVIEEGGMNHSAFPQTPFKTGNSTATCTTNNNPNSCVNIKKIFTDV

SEQ ID NO: 70439 - protein, 16 aa, Homo sapiens
LFTQFMGVVMFITLLG

SEQ ID NO: 70440 - protein, 31 aa, Homo sapiens
IYAVTVSMGLWAFITAGGSLRSIQRSLLCKD

SEQ ID NO: 70441 - protein, 230 aa, Homo sapiens
LLLLPLSLLVTSIQGHLVHMTVVSGSNVTLNISESLPENYKQLTWFYTFDQKIVEWDSRKSKYFESKFKGRVRLDPQSGALYISKVQKEDNSTYIMRVLKKTGNEQEWKIKLQVLDPVPKPVIKIEKIEDMDDNCYLKLSCVIPGESVNYTWYGDKRPFPKELQNSVLETTLMPHNYSRCYTCQVSNSVSSKNGTVCLSPPCTLARSFGVEWIASWLVVTVPTILGLLLT

SEQ ID NO: 70442 - protein, 362 aa, Homo sapiens [sequence omitted]

SEQ ID NO: 70443 - protein, 134 aa, Homo sapiens
LQRLVFLAAFVVYLETETLVTREAVTEILGIEPDREKGFHLDVEDYLSGVLILASELSRLSVNSVTAGDYSRPLHISTFINELDSGFRLLNLKNDSLRKRYDGLKYDVKKVEEVVYDLSIRGFNKETAAACVEK

SEQ ID NO: 70444 - protein, 81 aa, Homo sapiens
LCNLVMGLALIFLCTWAYVKYSGEFREIGTVIDQIAETLWEQVLKPLGDNLMEENIRQSVTNSIKAGLTDQVSHHARLKTD

SEQ ID NO: 70445 - protein, 71 aa, Homo sapiens
LAYFTFCLWIIPFAFFVSLSAGENVLPSTMQPGDDVVSNYFTKGKRGKRLGILVVFSFIKEAILPSRQKIY

SEQ ID NO: 70446 - protein, 17 aa, Homo sapiens
LLVGFLSCVSLVFVKFN

SEQ ID NO: 70447 - protein, 39 aa, Homo sapiens
MVIALILFLLRPPNLRGSSLPGKPTSPHNGQDPPAPPVD

SEQ ID NO: 70448 - protein, 24 aa, Homo sapiens
IAAQGFTVAAILLGLAVTAMKSRP

SEQ ID NO: 70449 - protein, 28 aa, Homo sapiens
MERSMMILLMAASMTMTSTQLWSFCCVH

SEQ ID NO: 70450 - protein, 29 aa, Homo sapiens
MASSLAFLLLNFHVSLLLVQLLTPCSGRE

SEQ ID NO: 70451 - protein, 29 aa, Homo sapiens
MASSLAFLLLNFHVSLFLVQLLTPCSGRE

SEQ ID NO: 70452 - protein, 36 aa, Homo sapiens
LLFLGTGLFIYFRNQKGHSGLQPTGLLRWTPELKCT

SEQ ID NO: 70453 - protein, 104 aa, Homo sapiens
VNDTYRTDLCLLYPPFMIALACLHVACVVQQKDARQWFAELSVDMEKILEIIRVILKLYEQWKNFDERKEMATILSKMPKPKPPPNSEGEQGPNGSQNSSYSQS

SEQ ID NO: 70454 - protein, 305 aa, Homo sapiens
IGLIFIPIGIGIFVTSNNIREIEIDYTGTEPSSPCNKCLSPDVTPCFCTINFTLEKSFEGNVFMYYGLSNFYQNHRRYVKSRDDSQLNGDSSALLNPSKECEPYRRNEDKPIAPCGAIANSMFNDTLELFLIGNDSYPIPIALKKKGIAWWTDKNVKFRNPPGGDNLEERFKGTTKPVNWLKPVYMLDSDPDNNGFINEDFIVWMRTAALPTFRKLYRLIERKSDLHPTLPAGRYSLNVTYNYPVHYFDGRKRMILSTISWMGGKNPFLGIAYIAVGSISFLLGVVLLVINHKYRNSSNTADITI

SEQ ID NO: 70455 - protein, 23 aa, Homo sapiens
ILELIMTALQIASFILLRLFAED

SEQ ID NO: 70456 - protein, 25 aa, Homo sapiens
LGGALLFWVLLHRRWSEAVAEVGPD

SEQ ID NO: 70457 - protein, 124 aa, Homo sapiens
KDATYTSARTLLAILRLSTALARLRMVDVVEKEDVNEAIRLMEMSKDSLLGDKGQTARTQRPADVIFATVRELVSGGRSVRFSEAEQRCVSRGFTPAQFQAALDEYEELNVWQVNASRTRITFV

SEQ ID NO: 70458 - protein, 25 aa, Homo sapiens
LHNVGLLGGWTVLLLLSLYEDDITF

SEQ ID NO: 70459 - protein, 27 aa, Homo sapiens
ISSIRNFLIYVALLRVTPFILKKLDSI

SEQ ID NO: 70460 - protein, 50 aa, Homo sapiens
VEILMFLSAIVMMKNRRSMPHEEGQRMGYRSAQPSLTCDISVFQSLWSNI

SEQ ID NO: 70461 - protein, 445 aa, Homo sapiens
LLLFWLGWLGMLAGAVVIIVRAPRCRELPAQKWWHTGALYRIGDLQAFQGHGAGNLAGLKGRLDYLSSLKVKGLVLGPIHKNQKDDVAQTDLLQIDPNFGSKEDFDSLLQSAKKKSIRVILDLTPNYRGENSWFSTQVDTVATKVKDALEFWLQAGVDGFQVRDIENLKDASSFLAEWQNITKGFSEDRLLIAGTNSSDLQQILSLLESNKDLLLTSSYLSDSGSTGEHTKSLVTQYLNATGNRWCSWSLSQARLLTSFLPAQLLRLYQLMLFTLPGTPVFSYGDEIGLDAAALPGQPMEAPVMLWDESSFPDIPGAVSANMTVKGQSEDPGSLLSLFRRLSDQRSKERSLLHGDFHAFSAGPGLFSYIRHWDQNERFLVVLNFGDVGLSAGLQASDLPASASLPAKADLLLSTQPGREEGSPLELERLKLEPHEGLLLRFPYAA

SEQ ID NO: 70462 - protein, 127 aa, Homo sapiens
VAAGLALGTLVGFSTLVACLVCRKEKKTKGPSRHPSLISSDSNNLKLNNVRLPRENMSLPSNLQLNDLTPDSRAVKPADRQMAQNNSRPELLDPEPGGLLTSQGFIRLPVLGYIYRVSSVSSDEIWL

SEQ ID NO: 70463 - protein, 26 aa, Homo sapiens
ILFYFFLYQYCSIHCSDRKQVRNIAN

SEQ ID NO: 70464 - protein, 73 aa, Homo sapiens
VLRFLTAFLVQISAHSDQNKMTNTNLAVVFGPNLLWAKDAAITLKAINPINTFTKFLLDHQGELFPSPDPSGL

SEQ ID NO: 70465 - protein, 117 aa, Homo sapiens
KDHYDIKMLTFLMLVRLSTLCPSAVLQRLDRLVEPLRATCTTKVKANSVKQEFEKQDELKRSAMRAVAALLTIPEAEKSPLMSEFQSQISSNPELAAIFESIQKDSSSTNLESMDTS

SEQ ID NO: 70466 - protein, 29 aa, Homo sapiens
ISWPFVLLIMPLVIWVYSTDTNFSDMFWS

SEQ ID NO: 70467 - protein, 39 aa, Homo sapiens
LLLGLLIYILYKLGFFKRSLPYGTAMEKAQLKPPATSDA

SEQ ID NO: 70468 - protein, 48 aa, Homo sapiens
IRDIRASVGAGFLYPLVGTMSTMPGLPTRPCFYDIDLDPETEQVNGLF

SEQ ID NO: 70469 - protein, 334 aa, Homo sapiens
LLWLLVLCALLLLLVQLLRFLRADGDLTLLWAEWQGRRPEWELTDMVVWVTGASSGIGEELAYQLSKLGVSLVLSARRVHELERVKRRCLENGNLKEKDILVLPLDLTDTGSHEAATKAVLQEFGRIDILVNNGGMSQRSLCMDTSLDVYRKLIELNYLGTVSLTKCVLPHMIERKQGKIVTVNSILGIISVPLSIGYCASKHALRGFFNGLRTELATYPGIIVSNICPGPVQSNIVENSLAGEVTKTIGNNGDQSHKMTTSRCVRLMLISMANDLKEVWISEQPFLLVTYLWQYMPTWAWWITNKMGKKRIENFKSGVDADSSYFKIFKTKHD

SEQ ID NO: 70470 - protein, 26 aa, Homo sapiens
LGIWTLIDVLLIGVGYVGPADGSLYI

SEQ ID NO: 70471 - protein, 39 aa, Homo sapiens
ILNSLYGFFLFLWFCSQRCRSEAEAKAQIEAFSSSQTTQ

SEQ ID NO: 70472 - protein, 48 aa, Homo sapiens
ITSFQGFLIFIWYWSMRLQARGGPSPLKSNSDSARLPISSGSTSSSRI

SEQ ID NO: 70473 - protein, 40 aa, Homo sapiens
LLLLLVAFIMGPQVAFPPALPGPAPVCTGLELLTGAVRKP

SEQ ID NO: 70474 - protein, 47 aa, Homo sapiens
MVLLGATHGLIFLPVLLSYIGPSVNKAKSCATEERYKGTERERLLNF

SEQ ID NO: 70475 - protein, 63 aa, Homo sapiens
IIYLTFPVAMFWVSNQAEWFEDDVIQRKRELWPPEKLQEIEEFKERLRKRREEKLLRDAQQNS

SEQ ID NO: 70476 - protein, 155 aa, Homo sapiens
IGILVLLIIVILGVPLIIFTIKANSEACRDGLRAVMECRNVTHLLQQELTEAQKGFQDVEAQAATCNHTVMALMASLDAEKAQGQKKVEELEGEITTLNHKLQDASAEVERLRRENQVLSVRIADKKYYPSSQDSSSAAAPQLLIVLLGLSALLQ

SEQ ID NO: 70477 - protein, 36 aa, Homo sapiens
LVQAVCIALMAVIGEYLCMRTELKEIPLNSAPKSNV

SEQ ID NO: 70478 - protein, 119 aa, Homo sapiens [sequence omitted]

SEQ ID NO: 70479 - protein, 125 aa, Homo sapiens
ILALIFIMGNSAKEALVWKVLGKLGMQPGRQHSIFGDPKKIVTEEFVRRGYLIYKPVPRSSPVEYEFFWGPRAHVESSKLKVMHFVARVRNRCSKDWPCNYDWDSDDDAEVEAILNSGARGYSAP

SEQ ID NO: 70480 - protein, 406 aa, Homo sapiens
MLLWTAVLLFVPCVGKTVWLYLQAWPNPVFEGDALTLRCQGWKNTPLSQVKFYRDGKFLHFSKENQTLSMGAATVQSRGQYSCSGQVMYIPQTFTQTSETAMVQVQELFPPPVLSAIPSPEPREGSLVTLRCQTKLHPLRSALRLLFSFHKDGHTLQDRGPHPELCIPGAKEGDSGLYWCEVAPEGGQVQKQSPQLEVRVQAPVSRPVLTLHHGPADPAVGDMVQLLCEAQRGSPPILYSFYLDEKIVGNHSAPCGGTTSLLFPVKSEQDAGNYSCEAENSVSRERSEPKKLSLKGSQVLFTPASNWLVPWLPASLLGLMVIAAALLVYVRSWRKAGPLPSQIPPTAPGGEQCPLYANVHHQKGKDEGVVYSVVHRTSKRSEARSAEFTVGRKFYHLCGGEMPAAQ

SEQ ID NO: 70481 - protein, 124 aa, Homo sapiens
MYVAIQALLSLYASGRTTGIMMDSGDEVTHTVPFYGGYALPHAILCLDLAGRDLTDYLMKILTERGYSFTTTAEQEIVHDIKEKPCYIALDFEQEMATGASSSSLEKSYKLPDSQVIIKAVLLL

SEQ ID NO: 70482 - protein, 132 aa, Homo sapiens
MSSSHLFYLALCLLTFTSSATAGPETLCGAELVDALQFVCGDRGFYFNKPTGYGSSSRRAPQTGIVDECCFRSCDLRRLEMYCAPLKPAKSARSVRAQRHTDMPKTQKYQPPSTNKNTKSQRRKGSTFEERK

SEQ ID NO: 70483 - protein, 572 aa, Homo sapiens
MAHVIAACLYLVCRTEGTPHMLLDLSDLLQVNVYVLGKTFLLLARELCINAPAIDPCLYIPRFAHLLEFGEKNHEVSMTALRLLQRMKRDWMHTGRRPSGLCGAALLVAARMHDFRRTVKEVISVVKVCESTLRKRLTEFEDTPTSQLTIDEFMKIDLEEECDPPSYTAGQRKLRMKQLEQVLSKKLEEVEGEISSYQDAIEIELENSRPKAKGGLASLAKDGSTEDTASSLCGEEDTEDEELEAAASHLNKDLYRELLGGAPGSSEAAGSPEWGGRPPALGSLLDPLPTAASLGISDSIRECISSQSSDPKDASGDGELDLSGIDDLEIDRRDLSMPRCAKAKSQPHFPVLAQYILNESEARVKAELWMRENAEYLREQREKEARIAKEKELGIYKEHKPKKSCKRREPIQASTAREAIEKMLEQKKISSKINYSVLRGLSSAGGGSPHREDAQPEHSASARKLSRRRTPASRSGADPVTSVGKRLRPLVSTQPAKKVATGEALLPSSPTLGAEPARPQAVLVESGPVSYHADEEADEEEPDEEDGEPCVSALQMMGSNDYGCDGDEDDGY

SEQ ID NO: 70484 - protein, 163 aa, Homo sapiens [sequence omitted]

SEQ ID NO: 70485 - protein, 19 aa, Homo sapiens
MFLDQIVQIALVFNLLLLD

SEQ ID NO: 70486 - protein, 116 aa, Homo sapiens
MSRYLLPLSALGTVAGAAVLLKDYVTGGACPSKATIPGKTVIVTGANTGIGKQTALELARRGGNIILACRDMEKCEAAAKDIRGETLNHHVNARHLDLASLKSIREFAAKIIEGVN

SEQ ID NO: 70487 - protein, 538 aa, Homo sapiens
MLENFALITALVCWHGMEDEETPEQSVSVEGVPQVRTPEASPSTQKIQSCDMCVPFLTDILHLTDLPGQELYLTGACAVFHQDQKHHSAEKPLESDMDKASFVQCCLFHESGMPFTSSEVGKDFLAPLGILQPQAIANYEKPNKISKCEEAFHVGISHYKWSQCRRESSHKHTFFHPRVCTGKRLYESSKCGKACCCECSLVQLQRVHPGERPYECSECGKSFSQTSHLNDHRRIHTGERPYVCGQCGKSFSQRATLIKHHRVHTGERPYECGECGKSFSQSSNLIEHCRIHTGERPYECDECGKAFGSKSTLVRHQRTHTGEKPYECGECGKLFRQSFSLVVHQRIHTTARPYECGQCGKSFSLKCGLIQHQLIHSGARPFECDECGKSFSQRTTLNKHHKVHTAERPYVCGECGKAFMFKSKLVRHQRTHTGERPFECSECGKFFRQSYTLVEHQKIHTGLRPYDCGQCGKSFIQKSSLIQHQVVHTGERPYECGKCGKSFTQHSGLILHRKSHTVERPRDSSKCGKPYSPRSNIV

SEQ ID NO: 70488 - protein, 10 aa, Homo sapiens
MLVFLALFFL

SEQ ID NO: 70489 - protein, 144 aa, Homo sapiens
MRWCLLLIWAQGLRQAPLASGMMTGTIETTGNISAEKGGSIILQCHLSSTTAQVTQVNWEQQDQLLAICNADLGWHISPSFKDRVAPGPGLGLTLQSLTVNDTGEYFCIYHTYPDGTYTGRIFLEVLESSGIPAGASWWINLSL

SEQ ID NO: 70490 - protein, 596 aa, Homo sapiens
MIYGLLVGLVLRYGIHVPSDVNNVTLSCEVQSSPTTLLVNVSGKFYEYMLKGEISSHELNNVQDNEMLRKVTFDPEVFFNILLPPIIFYAGYSLKRRHFFRNLGSILAYAFLGTAISCFVIGSIMYGCVTLMKVTGQLAGDFYFTDCLLFGAIVSATDPVTVLAIFHELQVDVELYALLFGESVLNDAVAIVLSSSIVAYQPAGDNSHTFDVTAMFKSIGIFLGIFSGSFAMGAATGVVTALVTKFTKLREFQLLETGLFFLMSWSTFLLAEAWGFTGVVAVLFCGITQAHYTYNNLSTESQHRTKQLFELLNFLAENFIFSYMGLTLFTFQNHVFNPTFVVGAFVAIFLGRAANIYPLSLLLNLGRRSKIGSNFQHMMMFAGLRGAMAFALAIRDTATYARQMMFSTTLLIVFFTVWVFGGGTTAMLSCLHIRVGVDSDQEHLGVPENERRTTKAESAWLFRMWYNFDHNYLKPLLTHSGPPLTTTLPACCGPIARCLTSPQAYENQEQLKDDDSDLILNDGDISLTYGDSTVNTEPATSSAPRRFMGNSSEDALDRELAFGDHELVIRGTRLVLPMDDSEPPLNLLDNTRHGPA

SEQ ID NO: 70491 - protein, 36 aa, Homo sapiens
ISSLRSLVIASLCMMERRTFTLSQHCPLATNGSTLR

SEQ ID NO: 70492 - protein, 15 aa, Homo sapiens
LVFFGGGFSIVLSMC

SEQ ID NO: 70493 - protein, 32 aa, Homo sapiens
VRPANLIKILLESALLVSYLCQISSWETAVTT

SEQ ID NO: 70494 - protein, 11 aa, Homo sapiens
ILSILMLIELS

SEQ ID NO: 70495 - protein, 31 aa, Homo sapiens
VEGGSPSWLAILLLCVEVLPVACPNPKLEEE

SEQ ID NO: 70496 - protein, 17 aa, Homo sapiens
LLLLFVSLWRGFCGPEP

SEQ ID NO: 70497 - protein, 789 aa, Homo sapiens
VVLSLALGMSGRWVLAWYRARRAVTLHSAPPVLPADSSSPAVAPDLFWGTYRPHVYFGMKTRSPKPLLTGLMWAQQGTTPGTPKLRHTCEQGDGVGPYGWEFHDGLSFGRQHIQDGALRLTTEFVKRPGGQHGGDWSWRVTVEPQDSGTSALPLVSLFFYVVTDGKEVLLPEVGAKGQLKFISGHTSELGDFRFTLLPPTSPGDTAPKYGSYNVFWTSNPGLPLLTEMVKSRLNSWFQHRPPGAPPERYLGLPGSLKWEDRGPSGQGQGQFLIQQVTLKIPISIEFVFESGSAQAGGNQALPRLAGSLLTQALESHAEGFRERFEKTFQLKEKGLSSGEQVLGQAALSGLLGGIGYFYGQGLVLPDIGVEGSEQKVDPALFPPVPLFTAVPSRSFFPRGFLWDEGFHQLVVQRWDPSLTREALGHWLGLLNADGWIGREQILGDEARARVPPEFLVQRAVHANPPTLLLPVAHMLEVGDPDDLAFLRKALPRLHAWFSWLHQSQAGPLPLSYRWRGRDPALPTLLNPKTLPSGLDDYPRASHPSVTERHLDLRCWVALGARVLTRLAEHLGEAEVAAELGPLAASLEAAESLDELHWAPELGVFADFGNHTKAVQLKPRPPQGLVRVVGRPQPQLQYVDALGYVSLFPLLLRLLDPTSSRLGPLLDILADSRHLWSPFGLRSLAASSSFYGQRNSEHDPPYWRGAVWLNVNYLALGALHHYGHLEGPHQARAAKLHGELRANVVGNVWRQYQATGFLWEQYSDRDGRGMGCRPFHGWTSLVLLAMAEDY

SEQ ID NO: 70498 - protein, 31 aa, Homo sapiens
MLEVLYLWLIMARTPMDLSSSSPMANSHIWT

SEQ ID NO: 70499 - protein, 78 aa, Homo sapiens
IILTIIILTIVGFIWLLKVNGCRKYKLNKTESTPVVEEDEMQPYASYTEKNNPLYDTTNKVKASEALQSEVDTDLHTL

SEQ ID NO: 70500 - protein, 206 aa, Homo sapiens
IGSVLGALIGVAGSTYVNRVRLQELKALLLEAQKGPVSLQEAIREQASSYSRQQRDLHNLMVDLRGLVHAAGPGQDSGSQAGSPPTRDRDVDVLSAALKEQLSHSRQVHSCLEGLREQLDGLEKTCSQMAGVVQLVKSAAHPGLVEPADGAMPSFLLEQGSMILALSDTEQRLEAQVNRNTIYSTLVTCVTFVATLPVLYMLFKAS

SEQ ID NO: 70501 - protein, 17 aa, Homo sapiens
IEILRGIGFILSTLLNQ

SEQ ID NO: 70502 - protein, 150 aa, Homo sapiens
ICLMVIFLGTLVHKSSSQGQDRHMIRMRQLIDIVDQLKNYVNDLVPEFLPAPEDVETNCEWSAFSCFQKAQLKSANTGNNERIINVSIKKLKRKPPSTNAGRRQKHRLTCPSCDSYEKKPPKEFLERFKSLLQKMIHQHLSSRTHGSEDS

SEQ ID NO: 70503 - protein, 12 aa, Homo sapiens
IKGSLLLVWGLR

SEQ ID NO: 70504 - protein, 1412 aa, Homo sapiens
IFSCFSLVFDFFWTLVSTISEMPSSLLGAAMPASTSAAALQEALENAGRLIDRQLQEDRMYPDLSELLMVSAPNNPTVSGMSDMDYPLQGPGLLSVPNLPEISSIRRVPLPPELVEQFGHMQCNCMMGVFPPISRAWLTIDSDIFMWNYEDGGDLAYFDGLSETILAVGLVKPKAGIFQPHVRHLLVLATPVDIVILGLSYANLQTGSGVLNDSLSGGMQLLPDPLYSLPTDNTYLLTITSTDNGRIFLAGKDGCLYEVAYQAEAGWFSQRCRKINHSKSSLSFLVPSLLQFTFSEDDPILQIAIDNSRNILYTRSEKGVIQVYDLGQDGQGMSRVASVSQNAIVSAAGNIARTIDRSVFKPIVQIAVIENSESLDCQLLAVTHAGVRLYFSTCPFRQPLARPNTLTLVHVRLPPGFSASSTVEKPSKVHRALYSKGILLMAASENEDNDILWCVNHDTFPFQKPMMETQMTAGVDGHSWALSAIDELKVDKIITPLNKDHIPITDSPVVVQQHMLPPKKFVLLSAQGSLMFHKLRPVDQLRHLLVSNVGGDGEEIERFFKLHQEDQACATCLILACSTAACDREVSAWATRAFFRYGGEAQMRFPTTLPPPSNVGPILGSPVYSSSPVPSGSPYPNPSFLGTPSHGIQPPAMSTPVCALGNPATQATNMSCVTGPEIVYSGKHNGICIYFSRIMGNIWDASLVVERIFKSGNREITAIESSVPCQLLESVLQELKGLQEFLDRNSQFAGGPLGNPNTTAKVQQRLIGFMRPENGNPQQMQQELQRKFHEAQLSEKISLQAIQQLVRKSYQALALWKLLCEHQFTIIVAELQKELQEQLKITTFKDLVIRDKELTGALIASLINCYIRDNAAVDGISLHLQDICPLLYSTDDAICSKANELLQRSRQVQNKTEKERMLRESLKEYQKISNQVDLSNVCAQYRQVRFYEGVVELSLTAAEKKDPQGLGLHFYKHGEPEEDIVGLQAFQERLNSYKCITDTLQELVNQSKAAPQSPSVPKKPGPPVLSSDPNMLSNEEAGHHFEQMLKLSQRSKDELFSIALYNWLIQVDLADKLLQVASPFLEPHLVRMAKVDQNRVRYMDLLWRYYEKNRSFSNAARVLSRLADMHSTEISLQQRLEYIARAILSAKSSTAISSIAADGEFLHELEEKMEVARIQLQIQETLQRQYSHHSSVQDAVSQLDSELMDITKLYGEFADPFKLAECKLAIIHCAGYSDPILVQTLWQDIIEKELSDSVTLSSSDRMHALSLKIVLLGKIYAGTPRFFPLDFIVQFLEQQVCTLNWDVGFVIQTMNEIGVPLPRLLEVYDQLFKSRDPFWNRMKKPLHLLDCIHVLLIRYVENPSQVLNCERRRFTNLCLDAVCGYLVELQSMSSSVAVQAITGNFKSLQAKLERLH

SEQ ID NO: 70505 - protein, 10 aa, Homo sapiens
LLSLAVYIFT

SEQ ID NO: 70506 - protein, 18 aa, Homo sapiens
IGMKWLLVAAWRTPAALL

SEQ ID NO: 70507 - protein, 41 aa, Homo sapiens
VMSPRRRWLFGGSEERLLLLLLLLVAPLQKSSKNSAVGSVR

SEQ ID NO: 70508 - protein, 316 aa, Homo sapiens
IMDLRQFLMCLSLCTAFALSKPTEKKDRVHHEPQLSDKVHNDAQSFDYDHDAFLGAEEAKTFDQLTPEESKERLGKIVSKIDGDKDGFVTVDELKDWIKFAQKRWIYEDVERQWKGHDLNEDGLVSWEEYKNATYGYVLDDPDPDDGFNYKQMMVRDERRFKMADKDGDLIATKEEFTAFLHPEEYDYMKDIVVQETMEDIDKNADGFIDLEEYIGDMYSHDGNTDEPEWVKTEREQFVEFRDKNRDGKMDKEETKDWILPSDYDHAEAEARHLVYESDQNKDGKLTKEEIVDKYDLFVGSQATDFGEALVRHDEF

SEQ ID NO: 70509 - protein, 29 aa, Homo sapiens
VFDVFRFAKLVVELIYFPLLPSLSFGGGN

SEQ ID NO: 70510 - protein, 13 aa, Homo sapiens
MLGVGLIVTIFPP

SEQ ID NO: 70511 - protein, 155 aa, Homo sapiens
VPIYNAIMFLFVLANFSMATFMDPGIFPRAEEDEDKEDDFRAPLYKTVEIKGIQVRMKWCATCRFYRPPRCSHCSVCDNCVEEFDHHCPWVNNCIGRRNYRYFFLFLLSLTAHIMGVFGFGLLYVLYHIEELSGVRTAVTYPSRPFRLWDWKGEE

SEQ ID NO: 70512 - protein, 21 aa, Homo sapiens
KNYPWFLCFAAFLKLFSHLLP

SEQ ID NO: 70513 - protein, 384 aa, Homo sapiens
KFTIKPLGFLLLQLSGDLEDLELALNKTKIKPSLGSGSCSALIKLLPGQSDLLVAHNTWNNYQHMLRVIKKYWLQFREGPWGDYPLVPGNKLVFSSYPGTIFSCDDFYILGSGLVTLETTIGNKNPALWKYVRPRGCVLEWVRNIVANRLASDGATWADIFKRFNSGTYNNQWMIVDYKAFIPGGPSPGSRVLTILEQIPGMVVVADKTSELYQKTYWASYNIPSFETVFNASGLQALVAQYGDWFSYDGSPRAQIFRRNQSLVQDMDSMVRLMRYNDFLHDPLSLCKACNPQPNGENAISARSDLNPANGSYPFQALRQRSHGGIDVKVTSMSLARILSLLAASGPTWDQVPPFQWSTSPFSGLLHMGQPDLWKFAPVKVSWD

SEQ ID NO: 70514 - protein, 47 aa, Homo sapiens
VFYLGWQCLIALGMSFLDCGHTCHLGLTAQPELYLLNTMDADSLVSR

SEQ ID NO: 70515 - protein, 457 aa, Homo sapiens
LGLLLGTAAGLGFLCLLYSQRWKRTQRHGRSQSLPNSLDYTQTSDPGRHVMLLRAVPGGAGDASVLPSLPREGQEKVLDRLDFVLTSLVALRREVEELRSSLRGLAGEIVGEVRCHMEENQRVARRRRFPFVRERSDSTGSSSVYFTASSGATFTDAESEGGYTTANAESDNERDSDKESEDGEDEVSCETVKMGRKDSLDLEEEAASGASSALEAGGSSGLEDVLPLLQQADELHRGDEQGKREGFQLLLNNKLVYGSRQDFLWRLARAYSDMCELTEEVSEKKSYALDGKEEAEAALEKGDESADCHLWYAVLCGQLAEHESIQRRIQSGFSFKEHVDKAIALQPENPMAHFLLGRWCYQVSHLSWLEKKTATALLESPLSATVEDALQSFLKAEELQPGFSKAGRVYISKCYRELGKNSEARWWMKLALELPDVTKEDLAIQKDLEELEVILRD

SEQ ID NO: 70516 - protein, 131 aa, Homo sapiens
IYSPHGHGWQHSLLGPILSCVAVCEVIDHPDVKCQTKKKDSKEIDRRRARIKHSEGGDIPPKYFVVTNNQLLRVKYLLVYSQKPPKRASSQLSWFSSHWFTVMISLYLLLLLIVSVINSSAFQHFWNRAKR

SEQ ID NO: 70517 - protein, 47 aa, Homo sapiens
TANLAVLVAFIILEKKPTFEVQFNLNDVLASSEELFLKVHKKATSRL

SEQ ID NO: 70518 - protein, 220 aa, Homo sapiens
LLLPILAMLMALCVHCHRLPGSYDSTSSDSLYPRGIQFKRPHTVAPWPPAYPPVTSYPPLSQPDLLPIPRSPQPLGGSHRTPSSRRDSDGANSVASYENEEPACEDADEDEDDYHNPGYLVVLPDSTPATSTAAPSAPALSTPGIRDSAFSMESIDDYVNVPESGESAEASLDGSREYVNVSQELHPGAAKTEPAALSSQEAEEVEEEGAPDYENLQELN

SEQ ID NO: 70519 - protein, 31 aa, Homo sapiens
ICLVLTIFANLFPAGEPRGAGRGRVAGAGPA

SEQ ID NO: 70520 - protein, 10 aa, Homo sapiens
LFMSVFFFFF

SEQ ID NO: 70521 - protein, 43 aa, Homo sapiens
INLELNSITQDPFSLWWLKLCTLQACTMAAAVTVKTPLHHNAP

SEQ ID NO: 70522 - protein, 44 aa, Homo sapiens
LLGAGLLLGAYVLVYYNLVKAPPCGGMGNLRGRTAVVTGECGGG

SEQ ID NO: 70523 - protein, 13 aa, Homo sapiens
KTVIMVYMLGFFF

SEQ ID NO: 70524 - protein, 671 aa, Homo sapiens
LKVLLLLTDLSLLWKFHPKDFSGKDNEEVKQLVTSEPEMIGAEVISEFLINGEESKVARLKLFPHHIGELHILGVVYNLGTIQGSMTVDGIGALPGCHTGKYSLSMSVRGKQDLEIQGPRLNNTKEEKTSVKYGPDRRLDPIITEEMPLLEVFFIHFPTGLLCGEIRKAYVEFVNVSKCPLTGLKVVSKRPEFFTFGGNTAVLTPLSPSASENCSAYKTVVTDATSVCTALISSASSVDFGIGTGSQPEVIPVPLPDTVLLPGASVQLPMWLRGPDEEGVHEINFLFYYESVKKQPKIRHRILRHTAIICTSRSLNVRATVCRSNSLENEEGRGGNMLVFVDVENTNTSEAGVKEFHIVQVSSSSKHWKLQKSVNLSENKDTKLASREKGKFCFKAIRCEKEEAATQSSEKYTFADIIFGNEQIISSASPCADFFYRSLSSELKKPQAHLPVHTEKQSTEDAVRLIQKCSEVDLNIVILWKAYVVEDSKQLILEGQHHVILRTIGKEAFSYPQKQEPPEMELLKFFRPENITVSSRPSVEQLSSLIKTSLHYPESFNHPFHQKSLCLVPVTLLLSNCSKADVDVIVDLRHKTTSPEALEIHGSFTWLGQTQYKLQLKSQEIHSLQLKACFVHTGVYNLGTPRVFAKLSDQVTVFETSQQNSMPALIIISNV

SEQ ID NO: 70525 - protein, 11 aa, Homo sapiens
ILLYFVNIFFF

SEQ ID NO: 70526 - protein, 116 aa, Homo sapiens
KRRLVKLVVNFLFYFRTDEAEPVGALLLERCRVVREEPGTFSISFIEDPERKYHFECSSEEQCQEWMEALRRASYEFMRRSLIFYRNEIRKVTGKDPLEQFGISEEARFQLSGLQA

SEQ ID NO: 70527 - protein, 27 aa, Homo sapiens
MPSGTGKTVSLLALIMAYQRVSDALNP

SEQ ID NO: 70528 - protein, 16 aa, Homo sapiens
LITFGWVILIVRDEEE

SEQ ID NO: 70529 - protein, 1327 aa, Homo sapiens
MFIVVCALVGVLVPELPDFSDPLLGFEPRGTAIGQRLVTWNNMVKNTGYKATLANYPFKYADEQAKSHRDDRWSDDHYEREKREVDWNFHKDSFFCDVPSDRYSRVVFTSSGGETLWNLPAIKSMCNVDNSRIRSHPQFGDLCQRTTAASCCPSWTLGNYIAILNNRSSCQKIVERDVSHTLKLLRTCAKHYQNGTLGPDCWDMAARRKDQLKCTNVPRKCTKYNAVYQILHYLVDKDFMTPKTADYATPALKYSMLFSPTEKGESMMNIYLDNFENWNSSDGVTTITGIEFGIKHSLFQDYLLMDTVYPAIAIVIVLLVMCVYTKSMFITLMTMFAIISSLIVSYFLYRVVFHFEFFPFMNLTALIILVGIGADDAFVLCDVWNYTKFDKPHAETSETVSITLQHAALSMFVTSFTTAAAFYANYVSNITAIRCFGVYAGTAILVNYVLMVTWLPAVVVLHERYLLNIFTCFKKPQQQIYDNKSCWTVACQKCHKVLFAISEASRIFFEKVLPCIVIKFRYLWLFWFLALTVGGAYIVCINPKMKLPSLELSEFQVFRSSHPFERYDAEYKKLFMFERVHHGEELHMPITVIWGVSPEDNGNPLNPKSKGKLTLDSSFNIASPASQAWILHFCQKLRNQTFFYQTDEQDFTSCFIETFKQWMENQDCDEPALYPCCSHWSFPYKQEIFELCIKRAIMELERSTGYHLDSKTPGPRFDINDTIRAVVLEFQSTYLFTLAYEKMHQFYKEVDSWISSELSSAPEGLSNGWFVSNLEFYDLQDSLSDGTLIAMGLSVAVAFSVMLLTTWNIIISLYAIISIAGTIFVTVGSLVLLGWELNVLESVTISVAVGLSVDFAVHYGVAYRLAPDPDREGKVIFSLSRVGSAMAMAALTTFVAGAMMMPSTVLAYTQLGTFMMLIMCISWAFATFFFQCMCRCLGPQGTCGQIPLPKKLQCSAFSHALSTSPSDKGQSKTHTINAYHLDPRGPKSELEHEFYELEPLASHSCTAPEKTTYEETHICSEFFNSQAKNLGMPVHAAYNSELSKSTESDAGSALLQPPLEQHTVCHFFSLNQRCSCPDAYKHLNYGPHSCQQMGDCLCHQCSPTTSSFVQIQNGVAPLKATHQAVEGFVHPITHIHHCPCLQGRVKPAGMQNSLPRNFFLHPVQHIQAQEKIGKTNVHSLQRSIEEHLPKMAEPSSFVCRSTGSLLKTCCDPENKQRELCKNRDVSNLESSGGTENKAGGKVELSLSQTDASVNSEHFNQNEPKVLFNHLMGEAGCRSCPNNSQSCGRIVRVKCNSVDCQMPNMEANVPAVLTHSELSGESLLIKTL

SEQ ID NO: 70530 - protein, 53 aa, Homo sapiens
MGTALKLLLGAGAVAYGVRESVFTVEGGHRAIFFNRIGGVQQDTILAEGLHFR

SEQ ID NO: 70531 - protein, 18 aa, Homo sapiens
MLRMTAFSLTLTFLWQSS

SEQ ID NO: 70532 - protein, 147 aa, Homo sapiens
MRSLLRTPFLCGLLWAFCAPGARAEEPAASFSQPGSMGLDKNTVHDQEHIMEHLEGVINKPEAEMSPQELQLHYFKMHDYDGNNLLDGLELSTAITHVHKEVGLAVAWGTVSQKGFPLLIWSPVLLTCVVLMCQECCFSTGHDGSHL

SEQ ID NO: 70533 - protein, 210 aa, Homo sapiens
MILWLKGVIFNVTTVDLKRKPADLQNLAPGTNPPFMTFDGEVKTDVNKIEEFLEEKLAPPRYPKLGTQHPESNSAGNDVFAKFSAFIKNTKKDANEIHEKNLLKALRKLDNYLNSPLPDEIDAYSTEDVTVSGRKFLDGDELTLADCNLLPKLHIIKIVAKKYRDFEFPSEMTGIWRYLNNAYARDEFTNTCPADQEIEHAYSDVAKRMK

SEQ ID NO: 70534 - protein, 31 aa, Homo sapiens
MLESVFLSWCFLLFWVSSLPKSISSKRRFNN

SEQ ID NO: 70535 - protein, 578 aa, Homo sapiens
MWNLVPWVLFCGCCRIFPDGVAGREQLLAQQRMHSMISSVDVKSEVPVGLEPISPLDLRTDLRMMMPVVDPVVREKQLQQELLLIQQQQQIQKQLLIAEFQKQHENLTRQHQAQLQEHIKELLAIKQQQELLEKEQKLEQQRQEQEVERHRREQQLPPLRGKDRGRERAVASTEVKQKLQEFLLSKSATKDTPTNGKNHSVSRHPKLWYTAAHHTSLDQSSPPLSGTSPSYKYTLPGAQDAKDDFPLRKTESSVSSSSPGSGPSSPNNGPTGSVTENETSVLPPTPHAEQMVSQQRILIHEDSMNLLSLYTSPSLPNITLGLPAVPSQLNASNSLKEKQKCETQTLRQGVPLPGQYGGSIPASSSHPHVTLEGKPPNSSHQALLQHLLLKEQMRQQKLLVAGGVPLHPQSPLATKERISPGIRGTHKLPRHRPLNRTQSAPLPQSTLAQLVIQQQHQQFLEKQKQYQQQIHMNKLLSKSIEQLKQPGSHLEEAEEELQGDQAMQEDRAPSSGNSTRSDSSACVDDTLGQVGAVKVKEEPVDSDEDAQIQEMESGEQAAFMQQVIGKDLAPGFVIKVII

SEQ ID NO: 70536 - protein, 526 aa, Homo sapiens
MVCSLWVLLLVSSVLALEEVLLDTTGETSEIGWLTYPPGGWDEVSVLDDQRRLTRTFEACHVAGAPPGTGQDNWLQTHFVERRGAQRAHIRLHFSVRACSSLGVSGGTCRETFTLYYRQAEEPDSPDSVSSWHLKRWTKVDTIAADESFPSSSSSSSSSSSSAAWAVGPHGAGQRAGLQLNVKERSFGPLTQRGFYVAFQDTGACLALVAVRLFSYTCPAVLRSFASFPETQASGAGGASLVAAVGTCVAHAEPEEDGVGGQAGGSPPRLHCNGEGKWMVAVGGCRCQPGYQPARGDKACQACPRGLYKASAGNAPCSPCPARSHAPNPAAPVCPCLEGFYRASSDPPEAPCTGPPSAPQELWFEVQGSALMLHWRLPRELGGRGDLLFNVVCKECEGRQEPASGGGGTCHRCRDEVHFDPRQRGLTESRVLVGGLRAHVPYILEVQAVNGVSELSPDPPQAAAINVSTSHEGELFSLAFRIPCLRSFEPPSLLLISSLVHPCRPPLKADPAPRDSYPHNNFPFAL

SEQ ID NO: 70537 - protein, 8 aa, Homo sapiens
LFLFVYLL

SEQ ID NO: 70538 - protein, 8 aa, Homo sapiens
LFLFVYLL

SEQ ID NO: 70539 - protein, 411 aa, Homo sapiens
IGASVLVVCVSVTVFVWSCCHQQAEKKQKNPPYKFIHMLKGISIYPETLSNKKKIIKVRRDKDGPGREGGRRNLLVDAAEAGLLSRDKDPRGPSSGSCIDQLPIKMDYGEELRSPITSLTPGESKTTSPSSPEEDVMLGSLTFSVDYNFPKKALVVTIQEAHGLPVMDDQTQGSDPYIKMTILPDKRHRVKTRVLRKTLDPVFDETFTFYGIPYSQLQDLVLHFLVLSFDRFSRDDVIGEVMVPLAGVDPSTGKVQLTRDIIKRNIQKCISRGELQVSLSYQPVAQRMTVVVLKARHLPKMDITGLSGNPYVKVNVYYGRKRIAKKKTHVKKCTLNPIFNESFIYDIPTDLLPDISIEFLVIDFDRTTKNEVVGRLILGAHSVTASGAEHWREVCESPRKPVAKWHSLSEY

SEQ ID NO: 70540 - protein, 674 aa, Homo sapiens
LLLLPLLLLKLHLWPQLRWLPADLAFAVRALCCKRALRARALAAAAADPEGPEGGCSLAWRLAELAQQRAAHTFLIHGSRRFSYSEAERESNRAARAFLRALGWDWGPDGGDSGEGSAGEGERAAPGAGDAAAGSGAEFAGGDGAARGGGAAAPLSPGATVALLLPAGPEFLWLWFGLAKAGLRTAFVPTALRRGPLLHCLRSCGARALVLAPEFLESLEPDLPALRAMGLHLWAAGPGTHPAGISDLLAEVSAEVDGPVPGYLSSPQSITDTCLYIFTSGTTGLPKAARISHLKILQCQGFYQLCGVHQEDVIYLALPLYHMSGSLLGIVGCMGIGATVVLKSKFSAGQFWEDCQQHRVTVFQYIGELCRYLVNQPPSKAERGHKVRLAVGSGLRPDTWERFVRRFGPLQVLETYGLTEGNVATINYTGQRGAVGRASWLYKHIFPFSLIRYDVTTGEPIRDPQGHCMATSPGEPGLLVAPVSQQSPFLGYAGGPELAQGKLLKDVFRPGDVFFNTGDLLVCDDQGFLRFHDRTGDTFRWKGENVATTEVAEVFEALDFLQEVNVYGVTVPGHEGRAGMAALVLRPPHALDLMQLYTHVSENLPPYARPRFLRLQESLATTETFKQQKVRMANEGFDPSTLSDPLYVLDQAVGAYLPLTTARYSALLAGNLRI

SEQ ID NO: 70541 - protein, 1087 aa, Homo sapiens
LLGVFLALVAPGVLGISCGSPPPILNGRISYYSTPIAVGTVIRYSCSGTFRLIGEKSLLCITKDKVDGTWDKPAPKCEYFNKYSSCPEPIVPGGYKIRGSTPYRHGDSVTFACKTNFSMNGNKSVWCQANNMWGPTRLPTCVSVFPLECPALPMIHNGHHTSENVGSIAPGLSVTYSCESGYLLVGEKIINCLSSGKWSAVPPTCEEARCKSLGRFPNGKVKEPPILRVGVTANFFCDEGYRLQGPPSSRCVIAGQGVAWTKMPVCEEIFCPSPPPILNGRHIGNSLANVSYGSIVTYTCDPDPEEGVNFILIGESTLRCTVDSQKTGTWSGPAPRCELSTSAVQCPHPQILRGRMVSGQKDRYTYNDTVIFACMFGFTLKGSKQIRCNAQGTWEPSAPVCEKECQAPPNILNGQKEDRHMVRFDPGTSIKYSCNPGYVLVGEESIQCTSEGVWTPPVPQCKVAACEATGRQLLTKPQHQFVRPDVNSSCGEGYKLSGSVYQECQGTIPWFMEIRLCKEITCPPPPVIYNGAHTGSSLEDFPYGTTVTYTCNPGPERGVEFSLIGESTIRCTSNDQERGTWSGPAPLCKLSLLAVQCSHVHIANGYKISGKEAPYFYNDTVTFKCYSGFTLKGSSQIRCKADNTWDPEIPVCEKGCQSPPGLHHGRHTGGNTVFFVSGMTVDYTCDPGYLLVGNKSIHCMPSGNWSPSAPRCEETCQHVRQSLQELPAGSRVELVNTSCQDGYQLTGHAYQMCQDAENGIWFKKIPLCKVIHCHPPPVIVNGKHTGMMAENFLYGNEVSYECDQGFYLLGEKKLQCRSDSKGHGSWSGPSPQCLRSPPVTRCPNPEVKHGYKLNKTHSAYSHNDIVYVDCNPGFIMNGSRVIRCHTDNTWVPGVPTCIKKAFIGCPPPPKTPNGNHTGGNIARFSPGMSILYSCDQGYLLVGEALLLCTHEGTWSQPAPHCKEVNCSSPADMDGIQKGLEPRKMYQYGAVVTLECEDGYMLEGSPQSQCQSDHQWNPPLAVCRSRSLAPVLCGIAAGLILLTFLIVITLYVISKHRARNYYTDTSQKEAFHLEAREVYSVDPYNPAS

SEQ ID NO: 70542 - protein, 41 aa, Homo sapiens
LLLLWLSLPVRLPSFVVSQRCAGLLLAALRIQGVGCQVQVS

SEQ ID NO: 70543 - protein, 7 aa, Homo sapiens
IFFGVFL

SEQ ID NO: 70544 - protein, 244 aa, Homo sapiens
LGTTCLIATAVITLFNEPSAEDSKKGPLTVAQKKAQNIMESFENPFRMFLPSLGHRAPVSQAAKFDPSTKIYEISNRWKLAQVQVQKDSKEAVKKKAAEQTVLSLAAAREQAKEACKAAAEQAISVRQQVVLENAAKKRERATSDPRTTEQKQEKKRLKISKKPKDPEPPEKEFTPYDYSQSDFKAFAGNSKSKVSSQFDPNKQTPSGKKCIAAKKIKQSVGNKSMSFPTGKSDRGFRYNWPQR

SEQ ID NO: 70545 - protein, 1024 aa, Homo sapiens
KWLRSLYLFYTCFCFSVLWLSTDASESRCQQGKTQFGVGLRSGGENHLWLLEGTPSLQSCWAACCQDSACHVFWWLEGMCIQADCSRPQSCRAFRTHSSNSMLVFLKKFQTADDLGFLPEDDVPHLLGLGWNWASWRQSPPRAALRPAVSSSDQQSLIRKLQKRGSPSDVVTPIVTQHSKVNDSNELGGLTTSGSAEVHKAITISSPLTTDLTAELSGGPKNVSVQPEISEGLATTPSTQQVKSSEKTQIAVPQPVAPSYSYATPTPQASFQSTSAPYPVIKELVVSAGESVQITLPKNEVQLNAYVLQEPPKGETYTYDWQLITHPRDYSGEMEGKHSQILKLSKLTPGLYEFKVIVEGQNAHGEGYVNVTVKPEPRKNRPPIAIVSPQFQEISLPTTSTVIDGSQSTDDDKIVQYHWEELKGPLREEKISEDTAILKLSKLVPGNYTFSLTVVDSDGATNSTTANLTVNKAVDYPPVANAGPNQVITLPQNSITLFGNQSTDDHGITSYEWSLSPSSKGKVVEMQGVRTPTLQLSAMQEGDYTYQLTVTDTIGQQATAQVTVIVQPENNKPPQADAGPDKELTLPVDSTTLDGSKSSDDQKIISYLWEKTQGPDGVQLENANSSVATVTGLQVGTYVFTLTVKDERNLQSQSSVNVIVKEEINKPPIAKITGNVVITLPTSTAELDGSKSSDDKGIVSYLWTRDEGSPAAGEVLNHSDHHPILFLSNLVEGTYTFHLKVTDAKGESDTDRTTVEVKPDPRKNNLVEIILDINVSQLTERLKGMFIRQIGVLLGVLDSDIIVQKIQPYTEQSTKMVFFVQNEPPHQIFKGHEVAAMLKSELRKQKADFLIFRALEVNTVTCQLNCSDHGHCDSFTKRCICDPFWMENFIKVQLRDGDSNCEWSVLYVIIATFVIVVALGILSWTVICCCKRQKGKPKRKSKYKILDATDQESLELKPTSRAGIKQKGLLLSSSLMHSESELDSDDAIFTWPDREKGKLLHGQNGSVPNGQTPLKARSPREEIL

SEQ ID NO: 70546 - protein, 20 aa, Homo sapiens
MLTKQIFTSAKLKLCILLLT

SEQ ID NO: 70547 - protein, 12 aa, Homo sapiens
ILPHTVFWLAYV

SEQ ID NO: 70548 - protein, 254 aa, Homo sapiens
LLPVGPLGRSMRWCLLLIWAQGLRQAPLASGMMTGTIETTGNISAEKGGSIILQCHLSSTTAQVTQVNWEQQDQLLAICNADLGWHISPSFKDRVAPGPGLGLTLQSLTVNDTGEYFCIYHTYPDGTYTGRIFLEVLESSVAEHGARFQIPLLGAMAATLVVICTAVIVVVALTRKKKALRIHSVEGDLRRKSAGQEEWSPSAPSPPGSCVQAEAAPAGLCGEQRGEDCAELHDYFNVLSYRSLGNCSFFTETG

SEQ ID NO: 70549 - protein, 63 aa, Homo sapiens
LLLLWLVLSLLGIQLAWGFYGNTVTGLYHRPGLGGQNGSTPDGSTHFPSWEMAANEPLKTHRE

SEQ ID NO: 70550 - protein, 13 aa, Homo sapiens
MEFSLIIVTVSVL

SEQ ID NO: 70551 - protein, 76 aa, Homo sapiens
LLLLSLALLGARARAEPAGSAVPAQSRPCVDCHAFEFMQRALQDLRKTACSLDARTETLLLQAERRALCACWPAGH

SEQ ID NO: 70552 - protein, 38 aa, Homo sapiens
IIMALGVFFGLVFTWLACKGQGSMDEGTADERAPLIRT

SEQ ID NO: 70553 - protein, 19 aa, Homo sapiens
RLSDAEIMGKLLAWLAVGM

SEQ ID NO: 70554 - protein, 598 aa, Homo sapiens
KRLLQAVALVLAALVLLPNVGLWALYRERQPDGTPGGSGAAVAPAAGQGSHSRQKKTFFLGDGQKLKDWHDKEAIRRDAQRVGNGEQGRPYPMTDAERVDQAYRENGFNIYVSDKISLNRSLPDIRHPNCNSKRYLETLPNTSIIIPFHNEGWSSLLRTVHSVLNRSPPELVAEIVLVDDFSDREHLKKPLEDYMALFPSVRILRTKKREGLIRTRMLGASVATGDVITFLDSHCEANVNWLPPLLDRIARNRKTIVCPMIDVIDHDDFRYETQAGDAMRGAFDWEMYYKRIPIPPELQKADPSDPFESPVMAGGLFAVDRKWFWELGGYDPGLEIWGGEQYEISFKVWMCGGRMEDIPCSRVGHIYRKYVPYKVPAGVSLARNLKRVAEVWMDEYAEYIYQRRPEYRHLSAGDVAVQKKLRSSLNCKSFKWFMTKIAWDLPKFYPPVEPPAAAWGEIRNVGTGLCADTKHGALGSPLRLEGCVRGRGEAAWNNMQVFTFTWREDIRPGDPQHTKKFCFDAISHTSPVTLYDCHSMKGNQLWKYRKDKTLYHPVSGSCMDCSESDHRIFMNTCNPSSLTQQWLFEHTNSTVLEKFNRN

SEQ ID NO: 70555 - protein, 10 aa, Homo sapiens
ISFCGAMLTF

SEQ ID NO: 70556 - protein, 236 aa, Homo sapiens
RWNYALLVPMLGLAAFRWIWSRESQKEVEKEREAYRRRTAAFQQDLEAKYHAMISENRRAVAQLSLELEKEQNRTASYREALISQGRKLVEEKKLLEQERAQVMQEKRQVQPLRSAYLSCLQREENWQRRARLLLKEFEAVLTERQNIYCSLFLPRSKRLEIEKSLLVRASVDPVAADLEMAAGLTDIFQHDTYCGDVWNTNKRQNGRLMWLYLKYWELVVELKKFKRVEEAILEK

SEQ ID NO: 70557 - protein, 38 aa, Homo sapiens
VVFLVYLYQRWLYPVDKRRVNEFGESYEEKATRAPHTD

SEQ ID NO: 70558 - protein, 28 aa, Homo sapiens
MMKFWLLDLVAKVMLLVIFLESALRLSK

SEQ ID NO: 70559 - protein, 40 aa, Homo sapiens
MYFYLHIISLLIILFLPMKPQAHTQRRPQTLNSINKRKTD

SEQ ID NO: 70560 - protein, 76 aa, Homo sapiens
ISFILAWIETWFLDFKVLPQEAEEENRLLIVQDASERAALIPGGLSDGQFYSPPESEAGSEEAEEKQDSEKPLLEL

SEQ ID NO: 70561 - protein, 74 aa, Homo sapiens
ILFSMMLMTGMPQLTSKEDIEYIRDALTVGKNEEDAKKYFLDQIEVCRDKGWTVQFNWFLHLVLGIKQGEKHSA

SEQ ID NO: 70562 - protein, 13 aa, Homo sapiens
LLLVCFIWPLGPW

SEQ ID NO: 70563 - protein, 929 aa, Homo sapiens
IFYLTFYILCFVGGGLVVTLLFGKTNSEKYLEQCEHSFLPPTSPGVPKCLEEMKREARTIKIDRRLTGANIIDEPLQQVIQFSLRDYVQYWYYTLSDDESFLLEIRQTLQNALIQFATRSKEIDWQPYFTTRIVDDFGTHLRVFRKAQQKITEKDDQVKGTAEDLVDTFFEVEVEMEKEVCRDLVCTSPKDEEGFLRDLCEVLLYLLLPPGDFQNKIMRYFVREILARGILLPLINQLSDPDYINQYVIWMIRDSNCNYEAFMNIIKLSDNIGELEAVRDKAAEELQYLRSLDTAGDDINTIKNQINSLLFVKKVCDSRIQRLQSGKEINTVKLAANFGKLCTVPLDSILVDNVALQFFMDYMQQTGGQAHLFFWMTVEGYRVTAQQQLEVLLSRQRDGKHQTNQTKGLLRAAAVGIYEQYLSEKASPRVTVDDYLVAKLADTLNHEDPTPEIFDDIQRKVYELMLRDERFYPSFRQNALYVRMLAELDMLKDPSFRGSDDGDGESFNGSPTGSINLSLDDLSNVSSDDSVQLHAYISDTGVCNDHGKTYALYAITVHRRNLNSEEMWKTYRRYSDFHDFHMRITEQFESLSSILKLPGKKTFNNMDRDFLEKRKKDLNAYLQLLLAPEMMKASPALAHYVYDFLENKAYSKGKGDFARKMDTFVNPLRNSMRNVSNAVKSLPDSLAEGMTKMSDNMGKMSERLGQDIKQSFFKVPPLIPKTDSDPEHRRVSAQLDDNVDDNIPLRVMLLLMDEVFDLKERNQWLRRNIKNLLQQLIRATYGDTINRKIVDHVDWMTSPEQVADSVKRFRDAFWPNGILAEAVPCRDKSIRMRTRVAGKTKLLAIMPDELKHIIGAETTRKGILRVFEMFQHNQLNRRMVYVFLEGFLETLFPQYKFRELFNKLHSRSKQMQKYKQKLQTTQAPSLQKR

SEQ ID NO: 70564 - protein, 472 aa, Homo sapiens
IACAFTLSLVYLIRLAAGHLVQLPAGVKSPPYIFSPIPFLGHAIAFGKSPIEFLENAYEKYGPVFSFTMVGKTFTYLLGSDAAALLFNSKNEDLNAEDVYSRLTTPVFGKGVAYDVPNPVFLEQKKMLKSGLNIAHFKQHVSIIEKETKEYFESWGESGEKNVFEALSELIILTASHCLHGKEIRSQLNEKVAQLYADLDGGFSHAAWLLPGWLPLPSFRRRDRAHREIKDIFYKAIQKRRQSQEKIDDILQTLLDATYKDGRPLTDDEVAGMLIGLLLAGQHTSSTTSAWMGFFLARDKTLQKKCYLEQKTVCGENLPPLTYDQLKDLNLLDRCIKETLRLRPPIMIMMRMARTPQTVAGYTIPPGHQVCVSPTVNQRLKDSWVERLDFNPDRYLQDNPASGEKFAYVPFGAGRHRCIGENFAYVQIKTIWSTMLRLYEFDLIDGYFPTVNYTTMIHTPENPVIRYKRRSK

SEQ ID NO: 70565 - protein, 49 aa, Homo sapiens
LSDVWGRKPFLLGTVFFTCFPIPLMRISPCLCKYRIRDKRPYNMIFGMN

SEQ ID NO: 70566 - protein, 153 aa, Homo sapiens
LWVLLGAVTLLFLISLAAHLSQWTRGRSRSHPGQGRSGESVEEVPLYGNLHYLQTGRLSQDPEPDQQDPTLGGPARAAEEVMCYTSLQLRPPQGRIPGPGTPVKYSEVVLDSEPKSQASGPEPELYASVCAQTRRARASFPDQAYANSQPAAS

SEQ ID NO: 70567 - protein, 22 aa, Homo sapiens
MLGVRGLLLVGLVYLVSHLSQR

SEQ ID NO: 70568 - protein, 21 aa, Homo sapiens
KTVNLKAFLIGLLMKTVYSVA

SEQ ID NO: 70569 - protein, 23 aa, Homo sapiens
LSISLILTAWFINMDLNFMDTLS

SEQ ID NO: 70570 - protein, 13 aa, Homo sapiens
ILALIIGLSVGLN

SEQ ID NO: 70571 - protein, 23 aa, Homo sapiens
ILYVWLGSWTMYTPSEKLPPTTS

SEQ ID NO: 70572 - protein, 140 aa, Homo sapiens
LSSLLGLLLLGLLLPASLTGGVGSLNLEELSEMRYGIEILPLPVMGGQSQSSDVVIVSSKYKQRYECRLPAGAIHFQREREEETPAYQGPGIPELLSPMRDAPCLLKTKDWWTYEFCYGRHIQQYHMEDSEIKGLQAASS

SEQ ID NO: 70573 - protein, 14 aa, Homo sapiens
RLFLLCFGIIFLIG

SEQ ID NO: 70574 - protein, 805 aa, Homo sapiens
LIFGLGAVWGLGVDPSLQIDVLTELELGESTTGVRQVPGLHNGTKAFLFQDTPRSIKASTATAEQFFQKLRNKHEFTILVTLKQTHLNSGVILSIHHLDHRYLELESSGHRNEVRLHYRSGSHRPHTEVFPYILADDKWHKLSLAISASHLILHIDCNKIYERVVEKPSTDLPLGTTFWLGQRNNAHGYFKGIMQDVQLLVMPQGFIAQCPDLNRTCPTCNDFHGLVQKIMELQDILAKTSAKLSRAEQRMNRLDQCYCERTCTMKGTTYREFESWIDGCKNCTCLNGTIQCETLICPNPDCPLKSALAYVDGKCCKECKSICQFQGRTYFEGERNTVYSSSGVCVLYECKDQTMKLVESSGCPALDCPESHQITLSHSCCKVCKGYDFCSERHNCMENSICRNLNDRAVCSCRDGFRALREDNAYCEDIDECAEGRHYCRENTMCVNTPGSFMCICKTGYIRIDDYSCTEHDECITNQHNCDENALCFNTVGGHNCVCKPGYTGNGTTCKAFCKDGCRNGGACIAANVCACPQGFTGPSCETDIDECSDGFVQCDSRANCINLPGWYHCECRDGYHDNGMFSPSGESCEDIDECGTGRHSCANDTICFNLDGGYDCRCPHGKNCTGDCIHDGKVKHNGQIWVLENDRCSVCSCQNGFVMCRRMVCDCENPTVDLFCCPECDPRLSSQCLHQNGETLYNSGDTWVQNCQQCRCLQGEVDCWPLPCPDVECEFSILPENECCPRCVTDPCQADTIRNDITKTCLDEMNVVRFTGSSWIKHGTECTLCQCKNGHICCSVDPQCLQEL

SEQ ID NO: 70575 - protein, 58 aa, Homo sapiens
LTWLLQKILLQLMSLELADLPLKMKDVHLNWKCHWRANVHHFPRLYVSSGKMLMLSVG

SEQ ID NO: 70576 - protein, 1328 aa, Homo sapiens
LCALLSCLLLTGSSSGSKLKDPELSLKGTQHIMQAGQTLHLQCRGEAAHKWSLPEMVSKESERLSITKSACGRNGKQFCSTLTLNTAQANHTGFYSCKYLAVPTSKKKETESAIYIFISDTGRPFVEMYSEIPEIIHMTEGRELVIPCRVTSPNITVTLKKFPLDTLIPDGKRIIWDSRKGFIISNATYKEIGLLTCEATVNGHLYKTNYLTHRQTNTIIDVQISTPRPVKLLRGHTLVLNCTATTPLNTRVQMTWSYPDEKNKRASVRRRIDQSNSHANIFYSVLTIDKMQNKDKGLYTCRVRSGPSFKSVNTSVHIYDKAFITVKHRKQQVLETVAGKRSYRLSMKVKAFPSPEVVWLKDGLPATEKSARYLTRGYSLIIKDVTEEDAGNYTILLSIKQSNVFKNLTATLIVNVKPQIYEKAVSSFPDPALYPLGSRQILTCTAYGIPQPTIKWFWHPCNHNHSEARCDFCSNNEESFILDADSNMGNRIESITQRMAIIEGKNKMASTLVVADSRISGIYICIASNKVGTVGRNISFYITDVPNGFHVNLEKMPTEGEDLKLSCTVNKFLYRDVTWILLRTVNNRTMHYSISKQKMAITKEHSITLNLTIMNVSLQDSGTYACRARNVYTGEEILQKKEITIRDQEAPYLLRNLSDHTVAISSSTTLDCHANGVPEPQITWFKNNHKIQQEPGIILGPGSSTLFIERVTEEDEGVYHCKATNQKGSVESSAYLTVQGTSDKSNLELITLTCTCVAATLFWLLLTLFIRKMKRSSSEIKTDYLSIIMDPDEVPLDEQCERLPYDASKWEFARERLKLGKSLGRGAFGKVVQASAFGIKKSPTCRTVAVKMLKEGATASEYKALMTELKILTHIGHHLNVVNLLGACTKQGGPLMVIVEYCKYGNLSNYLKSKRDLFFLNKDAALHMEPKKEKMEPGLEQGKKPRLDSVTSSESFASSGFQEDKSLSDVEEEEDSDGFYKEPITMEDLISYSFQVARGMEFLSSRKCIHRDLAARNILLSENNVVKICDFGLARDIYKNPDYVRKGDTRLPLKWMAPESIFDKIYSTKSDVWSYGVLLWEIFSLGGSPYPGVQMDEDFCSRLREGMRMRAPEYSTPEIYQIMLDCWHRDPKERPRFAELVEKLGDLLQANVQQDGKDYIPINAILTGNSGFTYSTPAFSEDFFKESISAPKFNSGSSDDVRYVNAFKFMSLERIKTFEELLPNATSMFDDYQGDSSTLLASPMLKRFTWTDSKPKASLKIDLRVTSKSKESGLSDVSRPSFCHSSCGHVSEGKRRFTYDHAELERKIACCSPPPDYNSVVLYSTPPI

SEQ ID NO: 70577 - protein, 10 aa, Homo sapiens
LGFFFFSSFL

SEQ ID NO: 70578 - protein, 246 aa, Homo sapiens
LPILAMLMALCVHCHRLPGSYDSTSSDSLYPRGIQFKRPHTVAPWPPAYPPVTSYPPLSQPDLLPIPSPQPLGGSHRTPSSRRDSDGANSVASYENEGASGIRGAQAGWGVWGPSWTRLTPVSLPPEPACEDADEDEDDYHNPGYLVVLPDSTPATSTAAPSAPALSTPGIRDSAFSMESIDDYVNVPESGESAEASLDGSREYVNVSQELHPGAAKTEPAALSSQEAEEVEEEGAPDYENLQELN

SEQ ID NO: 70579 - protein, 15 aa, Homo sapiens
LLLVAIVVVAVWPTN

SEQ ID NO: 70580 - protein, 110 aa, Homo sapiens
IDKVWNNLIGFMSLATLTPDENSLDFSSCMLRPGIKNAQELACGVCLLNVDSRSRKEEKPAEEHPKKAFNSETDSFKLAYGGHQYHASCANFWINCVEPKPPGLVLPDLL

SEQ ID NO: 70581 - protein, 556 aa, Homo sapiens
TAVLENLLFSAVLLGWGSLLIMLKSEGFYSYLCTEPENVTNGTVGGTAEPGHEEVSWMNGWLSCQAQDEMLNLAFTVGSFLLSAITLPLGIVMDKYGPRKLRLLGSACFAVSCLLIAYGASKPNALSVLIFIALALNGFGGMCMTFTSLTLPNMFGDLRSTFIALMIGSYASSAVTFPGIKLIYDAGVSFIVVLVVWAGCSGLVFLNCFFNWPLEPFPGPEDMDYSVKIKFSWLGFDHKITGKQFYKQVTTVGRRLSVGSSMRSAKEQVALQEGHKLCLSTVDLEVKCQPDAAVAPSFMHSVFSPILLLSLVTMCVTQLRLIFYMGAMNNILKFLVSGDQKTVMATVGLYTSIFGVLQLLCLLTAPVIGYIMDWRLKECEDASEEPEEKDANQGEKKKKKRDRQIQKITNAMRAFAFTNLLLVGFGVTCLIPNLPLQILSFILHTIVRGFIHSAVGGLYAAVYPSTQFGSLTGLQSLISALFALLQQPLFLAMMGPLQGDPLWVNVGLLLLSLLGFCLPLYLICYRRQLERQLQQRQEDDKLFLKINGSSNQEAFV

SEQ ID NO: 70582 - protein, 184 aa, Homo sapiens
KCSRGAVFGSPAITAPQMGPGRCLLTALLLLALAPPPEASQYCGRLEYWNPDNKCCSSCLQRFGPPPCPELSSLASQPLSRLLDELEVLEELIVLLDPEPGPGGGMAHGTTRHLAARYGLPAAWSTFAYSLRPSRSPLRALIEMVVAREPSASLGQLGTHLAQLGRADALRVLSKLGSSGVCWA

SEQ ID NO: 70583 - protein, 1363 aa, Homo sapiens
LLSPPLLLLLLPCEAEAAAAAAAVSGSAAAEAKECDRPCVNGGRCNPGTGQCVCPAGWVGEQCQHCGGRFRLTGSSGFVTDGPGNYKYKTKCTWLIEGQPNRIMRLRFNHFATECSWDHLYVYDGDSIYAPLVAAFSGLIVPERDGNETVPEVVATSGYALLHFFSDAAYNLTGFNITYSFDMCPNNCSGRGECKISNSSDTVECECSENWKGEACDIPHCTDNCGFPHRGICNSSDVRGCSCFSDWQGPGCSVPVPANQSFWTREEYSNLKLPRASHKAVVNGNIMWVVGGYMFNHSDYNMVLAYDLASREWLPLNRSVNNVVVRYGHSLALYKDKIYMYGGKIDSTGNVTNELRVFHIHNESWVLLTPKAKEQYAVVGHSAHIVTLKNGRVVMLVIFGHCPLYGYISNVQEYDLDKNTWSILHTQGALVQGGYGHSSVYDHRTRALYVHGGYKAFSANKYRLADDLYRYDVDTQMWTILKDSRFFRYLHTAVIVSGTMLVFGGNTHNDTSMSHGAKCFSSDFMAYDIACDRWSVLPRPDLHHDVNRFGHSAVLHNSTMYVFGGFNSLLLSDILVFTSEQCDAHRSEAACLAAGPGIRCVWNTGSSQCISWALATDEQEEKLKSECFSKRTLDHDRCDQHTDCYSCTANTNDCHWCNDHCVPRNHSCSEGQISIFRYENCPKDNPMYYCNKKTSCRSCALDQNCQWEPRNQECIALPENICGIGWHLVGNSCLKITTAKENYDNAKLFCRNHNALLASLTTQKKVEFVLKQLRIMQSSQSMSKLTLTPWVGLRKINVSYWCWEDMSPFTNSLLQWMPSEPSDAGFCGILSEPSTRGLKAATCINPLNGSVCERPANHSAKQCRTPCALRTACGDCTSGSSECMWCSNMKQCVDSNAYVASFPFGQCMEWYTMSTCPPENCSGYCTCSHCLEQPGCGWCTDPSNTGKGKCIEGSYKGPVKMPSQAPTGNFYPQPLLNSSMCLEDSRYNWSFIHCPACQCNGHSKCINQSICEKCENLTTGKHCETCISGFYGDPTNGGKCQPCKCNGHASLCNTNTGKCFCTTKGVKGDECQLCEVENRYQGNPLRGTCYYTLLIDYQFTFSLSQEDDRYYTAINFVATPDEQNRDLDMFINASKNFNLNITWAASFSAGTQAGEEMPVVSKTNIKEYKDSFSNEKFDFRNHPNITFFVYVSNFTWPIKIQIAFSQHSNFMDLVQFFVTFFSCFLSLLLVAAVVWKIKQSCWASRRREQLLREMQQMASRPFASVNVALETDEEPPDLIGGSIKTVPKPIALEPCFGNKAAVLSVFVRLPRGLGGIPPPGQSGLAVASALVDISQQMPIVYKEKSGAVRNRKQQPPAQPGTCI

SEQ ID NO: 70584 - protein, 13 aa, Homo sapiens
MSWLKCCLLFLPT

SEQ ID NO: 70585 - protein, 28 aa, Homo sapiens
MMKFWLLDLVAKVMLLVIFLESALRLSK

SEQ ID NO: 70586 - protein, 29 aa, Homo sapiens
MFADTLLIVFISVCTALLAEGESGYFSDV

SEQ ID NO: 70587 - protein, 536 aa, Homo sapiens [sequence omitted]

SEQ ID NO: 70588 - protein, 533 aa, Homo sapiens
MLFCLGIFLSFYLLTVLLACWENWRQKKKTLLVAIDRACPESASLLGHPRVLADSFPGSSPYEGYNYGSFENVSGSTDGLVDSAGTGDLSYGYQGTRPRVDSMSSVEEDDYDTLTDIDSDKNVIRTKQYLYVADLARKDKRVLRKKYQIYFWNIATIAVFYALPVVQLVITYQTVVNVTGNQDICYYNFLCAHPLGNLSAFNNILSNLGYILLGLLFLLIILQREINHNRALLRNDLCALECGIPKHFGLFYAMGTALMMEGLLSACYHVCPNYTNFQFDTSFMYMIAGLCMLKLYQKRHPDINASAYSAYACLAIVIFFSVLGVVFGKGNTAFWIVFSIIHIIATLLLSTQLYYMGRWKLDSGIFRRILHVLYTDCIRQCSGPLYVDRMVLLVMGNVINWSLAAYGLIMRPNDFASYLLAIGICNLLLYFAFYIIMKLRSGERIKLIPLLCIVCTSVVWGFALFFFFQGLSTWQKTPAESREHNRDCILLDFFDDHDIWHFLSSIAMFGSFLVLLTLDDDLDTVQRDKIYVF

SEQ ID NO: 70589 - protein, 236 aa, Homo sapiens
MGGRVFLAFCVWLTLPGAETQDSRGCARWCPQNSSCVNATACRCNPGFSSFSEIITTPTETCDDINECATPSKVSCGKFSDCWNTEGSYDCVCSPGYEPVSGAKTFKNESENTCQDVDECQQNPRLCKSYGTCVNTLGSYTCQCLPGFKFIPEDPKVCTDVNECTSGQNPCHSSTHCLNNVGSYQCRCRPGWQPIPGSPNGPNNTVCEGRELRSHVSSDPQTSDHMFNGAHTNQAE

SEQ ID NO: 70590 - protein, 2031 aa, Homo sapiens
MWQERFLSPLLGRFLEGVAAVLATPAEDVFIFNIQNDTDVGGTVLNVSFSALAPRGAGAGAAGPWFSSEELQEQLYVRRAALAARSLLDVLPFDDNVCLREPCENYMKCVSVLRFDSSAPFLASASTLFRPIQPIAGLRCRCPPGFTGDFCETELDLCYSNPCRNGGACARREGGYTCVCRPRFTGEDCELDTEAGRCVPGVCRNGGTCTDAPNGGFRCQCPAGGAFEGPRCEVAARSFPPSSFVMFRGLRQRFHLTLSLSFATVQQSGLLFYNGRLNEKHDFLALELVAGQVRLTYSTGESNTVVSPTVPGGLSDGQWHTVHLRYYNKPRTDALGGAQGPSKDKVAVLSVDDCDVAVALQFGAEIGNYSCAAAGVQTSSKKSLDLTGPLLLGGVPNLPENFPVSHKDFIGCMRDLHIDGRRVDMAAFVANNGTMAGCQAKLHFCDSGPCKNSGFCSERWGSFSCDCPVGFGGKDCQLTMAHPHHFRGNGTLSWNFGSDMAVSVPWYLGLAFRTRATQGVLMQVQAGPHSTLLCQLDRGLLSVTVTRGSGRASHLLLDQVTVSDGRWHDLRLELQEEPGGRRGHHVLMVSLDFSLFQDTMAVGSELQGLKVKQLHVGGLPPGSAEEAPQGLVGCIQGVWLGSTPSGSPALLPPSHRVNAEPGCVVTNACASGPCPPHADCRDLWQTFSCTCQPGYYGPGCVDACLLNPCQNQGSCRHLPGAPHGYTCDCVGGYFGHHCEHRMDQQCPRGWWGSPTCGPCNCDVHKGFDPNCNKTNGQCHCKEFHYRPRGSDSCLPCDCYPVGSTSRSCAPHSGQCPCRPGALGRQCNSCDSPFAEVTASGCRVLYDACPKSLRSGVWWPQTKFGVLATVPCPRGALGAAVRLCDEAQGWLEPDLFNCTSPAFRELSLLLDGLELNKTALDTMEAKKLAQRLREVTGHTDHYFSQDVRVTARLLAHLLAFESHQQGFGLTATQDAHFNENLLWAGSALLAPETGDLWAALGQRAPGGSPGSAGLVRHLEEYAATLARNMELTYLNPMGLVTPNIMLSIDRMEHPSSPRGARRYPRYHSNLFRGQDAWDPHTHVLLPSQSPRPSPSEVLPTSSSIENSTTSSVVPPPAPPEPEPGISIIILLVYRTLGGLLPAQFQAERRGARLPQNPVMNSPVVSVAVFHGRNFLRGILESPISLEFRLLQTANRSKAICVQWDPPGLAEQHGVWTARDCELVHRNGSHARCRCSRTGTFGVLMDASPRERLEGDLELLAVFTHVVVAVSVAALVLTAAILLSLRSLKSNVRGIHANVAAALGVAELLFLLGIHRTHNQLVCTAVAILLHYFFLSTFAWLFVQGLHLYRMQVEPRNVDRGAMRFYHALGWGVPAVLLGLAVGLDPEGYGNPDFCWISVHEPLIWSFAGPVVLVIVMNGTMFLLAARTSCSTGQREAKKTSALTLRSSFLLLLLVSASWLFGLLAVNHSILAFHYLHAGLCGLQGLAVLLLFCVLNADARAAWMPACLGRKAAPEEARPAPGLGPGAYNNTALFEESGLIRITLGASTVSSVSSARSGRTQDQDSQRGRSYLRDNVLVRHGSAADHTDHSLQAHAGPTDLDVAMFHRDAGADSDSDSDLSLEEERSLSIPSSESEDNGRTRGRFQRPLCRAAQSERLLTHPKDVDGNDLLSYWPALGECEAAPCALQTWGSERRLGLDTSKDAANNNQPDPALTSGDETSLGRAQRQRKGILKNRLQYPLVPQTRGAPELSWCRAATLGHRAVPAASYGRIYAGGGTGSLSQPASRYSSREQLDLLLRRQLSRERLEEAPAPVLRPLSRPGSQECMDAAPGRLEPKDRGSTLPRRQPPRDYPGAMAGRFGSRDALDLGAPREWLSTLPPPRRTRDLDPQPPPLPLSPQRQLSRDPLLPSRPLDSLSRSSNSREQLDQVPSRHPSREALGPLPQLLRAREDSVSGPSHGPSTEQLDILSSILASFNSSALSSVQSSSTPLGPHTTATPSATASVLGPSTPRSATSHSISELSPDSEVPRSEGHS

SEQ ID NO: 70591 - protein, 111 aa, Homo sapiens
MKGTIGWAWISALPCWVRGSRAVLQLYPENSEQLELITTQATKAGFSGGMVVDYPNSAKAKKFYLCLFSGPSTFIPEGLSENQDEVEPRESVFTNERILLVLTLVSSNDMS

SEQ ID NO: 70592 - protein, 85 aa, Homo sapiens
ICVWWVSAKNAHFVFFLFLHQDPLTTVREQCEQLEKCVKARERLELCDERVSSRSHTEEDCTEELFDFLHARDHCVAHKLFNNLK

SEQ ID NO: 70593 - protein, 50 aa, Homo sapiens
IWTSAAFIFSYITAVTLHHIDPALPYISDTGTVAPEKCLFGAMLNIAAVL

SEQ ID NO: 70594 - protein, 25 aa, Homo sapiens
KTVSFHLYIRSVQFLLLPGWALPGC

SEQ ID NO: 70595 - protein, 12 aa, Homo sapiens
IMLIVYVRFWWL

SEQ ID NO: 70596 - protein, 12 aa, Homo sapiens
LVFFSFLAFFFF

SEQ ID NO: 70597 - protein, 11 aa, Homo sapiens
LMLVFLALFFL

SEQ ID NO: 70598 - protein, 27 aa, Homo sapiens
MATFLCMASIWLSYKISCVTQSTDAAV

SEQ ID NO: 70599 - protein, 27 aa, Homo sapiens
VFLILCGLTLIHRKLPPTWKPLPHKQQ

SEQ ID NO: 70600 - protein, 23 aa, Homo sapiens
IIGGIVFLAFAFSALFISPDSGF

SEQ ID NO: 70601 - protein, 12 aa, Homo sapiens
MCFKPIFFLLFH

SEQ ID NO: 70602 - protein, 18 aa, Homo sapiens
LFLATVLYIVKKRLFPFL

SEQ ID NO: 70603 - protein, 26 aa, Homo sapiens
MWRLTAIFLFQLILPRCISQKTLIHR

SEQ ID NO: 70604 - protein, 15 aa, Homo sapiens
TILISILKLVLEILF

SEQ ID NO: 70605 - protein, 31 aa, Homo sapiens
LFVFIGTLMYTEVWNNLGTTKSEPQKDSKKN

SEQ ID NO: 70606 - protein, 22 aa, Homo sapiens
RNSFPHLLYRLLFPRLMLLLDY

SEQ ID NO: 70607 - protein, 25 aa, Homo sapiens
LLMMLGVRGLLLVGLVYLVSHLSQR

SEQ ID NO: 70608 - protein, 19 aa, Homo sapiens
LKVFLPSLLLSHLLAIGLG

SEQ ID NO: 70609 - protein, 19 aa, Homo sapiens
VYFALSISLHVWVMVRVAV

SEQ ID NO: 70610 - protein, 21 aa, Homo sapiens
IFGMIFSMILCCAIRRNREMV

SEQ ID NO: 70611 - protein, 10 aa, Homo sapiens
MIFFGKVFLV

SEQ ID NO: 70612 - protein, 12 aa, Homo sapiens
ILKFIILILNYL

SEQ ID NO: 70613 - protein, 165 aa, Homo sapiens
ILLLVFVTEVVVVVLGYVYRAKVENEVDRSIQKVYKTYNGTNPDAASRAIDYVQRQLHCCGIHNYSDWENTDWFKETKNQSVPLSCCRETASNCNGSLAHPSDLYAEGCEALVVKKLQEIMMHVIWAALAFAAIQLLGMLCACIVLCRRSRDPAYELLITGGTYA

SEQ ID NO: 70614 - protein, 25 aa, Homo sapiens
IINAMLLSVLELFSFWRIWSRSELK

SEQ ID NO: 70615 - protein, 68 aa, Homo sapiens
ILAMLMALCVHCHRLPGSYDSTSSDSLYPRGIQFKRPHTVAPWPPAYPPVTSYPPLSQPDLLPIPHDP

SEQ ID NO: 70616 - protein, 15 aa, Homo sapiens
LLTCVVMFLVVQYLT

SEQ ID NO: 70617 - protein, 39 aa, Homo sapiens
ILTFLGFVGAASFGVRRLIGVTEIEKGSSYGNQEFKKKE

SEQ ID NO: 70618 - protein, 151 aa, Homo sapiens
LLFGLLGVLVAAPDGGFDLSDALPDNENKKPTAIPKKPSAGDDFDLGDAVVDGENDDPRPPNPPKPMPNPNPNHPSSSGSFSDADLADGVSGGEGKGGSDGGGSHRKEGEEADAPGVIPGIVGAVVVAVAGAISSFIAYQKKKLCFKENDG

SEQ ID NO: 70619 - protein, 26 aa, Homo sapiens
MIPFRLIWRLARLLISSSSTLVTCVW

SEQ ID NO: 70620 - protein, 220 aa, Homo sapiens
MESPTLLCVALLFFAPDGVLAVSSTKWFHNGSLSEETNSSLNIVNAKFEDSGEYKCQHQQVNESEPVYLEVFSDWLLLQASAEVVMEGQPLFLRCHGWRNWDVYKVIYYKDGEALKYWYENHNISITNATVEDSGTYYCTGKVWQLDYESEPLNITVIKAPREKYWLQFFIPLLVVILFAVDTGLFISTQQQVTFLLKIKRTRKGFRLLNPHPKPNPKNN

SEQ ID NO: 70621 - protein, 257 aa, Homo sapiens
MWGLLTFIMVPGCQAELCDDDPPEIPHATFKAMAYKEGTMLNCECKRGFRRIKSGSLYMLCTGNSSHSSWDNQCQCTSSATRNTTKQVTPQPEEQKERKTTEMQSPMQPVDQASLPGHCREPPPWENEATERIYHFVVGQMVYYQCVQGYRALHRGPAESVCKMTHGKTRWTQPQLICTGEEKPQASPEGRPESETSCLVTTTDFQIQTEMAATMETSIFTTEYQVAVAGCVFLLISVLLLSGLTWQRRQRKSRRTI

SEQ ID NO: 70622 - protein, 652 aa, Homo sapiens
MYRERLRTLLVIAVVMSLLNALSTSGGSISWNDFVHEMLAKGEVQRVQVVPESDVVEVYLHPGAVVFGRPRLALMYRMQVANIDKFEEKLRAAEDELNIEAKDRIPVSYKRTGFFGNALYSVGMTAVGLAILWYVFRLAGMTGREGGFSAFNQLKMARFTIVDGKMGKGVSFKDVAGMHEAKLEVREFVDYLKLGAKVPKGALLLGPPGCGKTLLAKAVATEAQVPFLAMAGPEFVEVIGGLGAARVRSLFKEARARAPCIVYIDEIDAVGKKRSTTMSGFSNTEEEQTLNQLLVEMDGMGTTDHVIVLASTNRADILDGALMRPGRLDRHVFIDLPTLQERREIFEQHLKSLKLTQSSTFYSQRLAELTPGFSGADIANICNEAALHAAREGHTSVHTLNFEYAVERVLAGTAKKSKILSKEEQKVVAFHESGHALVGWMLEHTEAVMKVSITPRTNAALGFAQMLPRDQHLFTKEQLFERMCMALGGRASEALSFNEVTSGAQDDLRKVTRIAYSMVKQFGMAPGIGPISFPEAQEGLMGIGRRPFSQGLQQMMDHEARLLVAKAYRHTEKVLQDNLDKLQALANALLEKEVINYEDIEALIGPPPHGPKKMIAPQRWIDAQREKQDLGEEETEETQQPPLGGEEPTWPK

SEQ ID NO: 70623 - protein, 9 aa, Homo sapiens
MIFLFLVCL

SEQ ID NO: 70624 - protein, 366 aa, Homo sapiens
MLIAGIVICAFWVYRHHKMAYPPVLVPTQDPGPPPPSPLLGLKPLQLLEVKARGRFGCVWKAQLLNEYVAVKIFPIQDKQSWQNEYEVYSLPGMKHENILQFIGAEKRGTSVDVDLWLITAFHEKGSLSDFLKANVVSWNELCHIAETMARGLAYLHEDIPGLKDGHKPAISHRDIKSKNVLLKNNLTACIADFGLALKFEAGKSAGDTHGQVGTRRYMAPEVLEGAINFQRDAFLRIDMYAMGLVLWELASRCTAADGPVDEYMLPFEEEIGQHPSLEDMQEVVVHKKKRPVLRDYWQKHAGMAMLCETIEECWDHDAEARLSAGCVGERITQMQRLTNIITTEDIVTVVTMVTNVDFPPKESSL

SEQ ID NO: 70625 - protein, 145 aa, Homo sapiens
MKPLLVHCLLFFSGAHVTITDRKVALEFLKSNVQANLPPHIQTKTVVKELTWGQNLGSFSPGEFDLILGADIIYLEETFTDLLQTLEHLCSNHSVILLACRIRYERDNNFLAMLERQFTVRKVHYDPEKDVHIYEAQKRNQKEDL

SEQ ID NO: 70626 - protein, 437 aa, Homo sapiens
MGLSVLLGLLALMATAAVARGWLRAGEERSGRPACQKANGFPPDKSSGSKKQKQYQRIRKEKPQQHNFTHRLLAAALKSHSGNISCMDFSSNGKYLATCADDRTIRIWSTKDFLQREHRSMRANVELDHATLVRFSPDCRAFIVWLANGDTLRVFKMTKREDGGYTFTATPEDFPKKHKAPVIDIGIANTGKFIMTASSDTTVLIWSLKGQVLSTINTNQMNNTHAAVSPCGRFVASCGFTPDVKVWEVCFGKKGEFQEVVRAFELKGHSAAVHSFAFSNDSRRMASVSKDGTWKLWDTDVEYKKKQDPYLLKTGRFEEAAGAAPCRLALSPNAQVLALASGSSIHLYNTRRGEKEECFERVHGECIANLSFDITGRFLASCGDRAVRLFHNTPGHRAMVEEMQGHLKRASNESTRQRLQQQLTQAQVTLGGPGAED

SEQ ID NO: 70627 - protein, 13 aa, Homo sapiens
MLQFIWILSWIEA

SEQ ID NO: 70628 - protein, 16 aa, Homo sapiens
MGLFLLHIICTVLDMR

SEQ ID NO: 70629 - protein, 13 aa, Homo sapiens
VFCTYPVFCLLVA

SEQ ID NO: 70630 - protein, 210 aa, Homo sapiens
IPMHTAKGLALFHAQLAYCVVQFLEKDTTLTEPVIRGLLKFWPKTCSQKEVMFLGEIEEILDVIEPTQFKKIEEPLFKQISKCVSSSHFQVAERALYFWNNEYILSLIEENIDKILPIMFASLYKISKEHWNPTIVALVYNVLKTLMEMNGKLFDDLTSSYKAERQREKKKELEREELWKKLEELKLKKALEKQNSAYNMHSILSNTSAE

SEQ ID NO: 70631 - protein, 55 aa, Homo sapiens
LCIATVFLSVGGTALYCTFGDMESPVCTDFADNMDFYYTKLLQGVAELKHWIYLS

SEQ ID NO: 70632 - protein, 308 aa, Homo sapiens
LWPLLLSIIFIPALLQCIVLPFCPESPRFLLINRNEENRAKSVLKKLRGTADVTHDLQEMKEESRQMMREKKVTILELFRSPAYRQPILIAVVLQLSQQLSGINAVFYYSTSIFEKAGVQQPVYATIGSGIVNTAFTVVSLFVVERAGRRTLHLIGLAGMAGCAILMTIALALLEQLPWMSYLSIVAIFGFVAFFEVGPGPIPWFIVAELFSQGPRPAAIAVAGFSNWTSNFIVGMCFQYVEQLCGPYVFIIFTVLLVLFFIFTYFKVPETKGRTFDEIASGFRQGGASQSDKTPEELFHPLGADSQV

SEQ ID NO: 70633 - protein, 22 aa, Homo sapiens
IYSIVYLLYFCLIEIMNVVCRH

SEQ ID NO: 70634 - protein, 330 aa, Homo sapiens
IFGWRGSFLILGGLLLNCCVAGALMRPIGPKPTKAGKDKSKASLEKAGKSGVKKDLHDANTDLIGRHPKQEKRSVFQTINQFLDLTLFTHRGFLLYLSGNVIMFFGLFAPLVFLSSYGKSQHYSSEKSAFLLSILAFVDMVARPSMGLVANTKPIRPRIQYFFAASVVANGVCHMLAPLSTTYVGFCVYAGFFGFAFGWLSSVLFETLMDLVGPQRFSSAVGLVTIVECCPVLLGPPLLGRLNDMYGDYKYTYWACGVVLIISGIYLFIGMGINYRLLAKEQKANEQKKESKEEETSIDVAGKPNEVTKAAESPDQKDTDGGPKEEESPV

SEQ ID NO: 70635 - protein, 184 aa, Homo sapiens
TMRLLSFVVLALFAVTQAEEGARLLASKSLLNRYAVEGRDLTLQYNIYNVGSSAALDVELSDDSFPPEDFGIVSGMLNVKWDRIAPASNVSHTVVLRPLKAGYFNFTSATITYLAQEDGPVVIGSTSAPGQGGILAQREFDRRFSPHFLDWAAFGVMTLPSIGIPLLLWYSSKRKYDTPKTKKN

SEQ ID NO: 70636 - protein, 9 aa, Homo sapiens
LLVYLLVYQ

SEQ ID NO: 70637 - protein, 44 aa, Homo sapiens
IALLCGAFLALFKAAEFAKLSIKWMIKIRKRYLKRRGQATSHIS

SEQ ID NO: 70638 - protein, 54 aa, Homo sapiens
IHVFYSKVLNMGVSFFYSLSLMTQQKRNCRPWDNQHLNKLYNYFFKLSYRVIRL

SEQ ID NO: 70639 - protein, 32 aa, Homo sapiens
MTVYLLLLSARMMRILTTIILTEAPKMVSWGT

SEQ ID NO: 70640 - protein, 64 aa, Homo sapiens
LWIIPFAFFVSLSAGENVLPSTMQPGDDVVSNYFTKGKRGKRLGILVVFSFIKEAILPSRQKIY

SEQ ID NO: 70641 - protein, 17 aa, Homo sapiens
ISPLILSLAMMTICIPA

SEQ ID NO: 70642 - protein, 35 aa, Homo sapiens
IWHFLSATALFFSFLVLLTLDDDLDVVRRDQIPVF

SEQ ID NO: 70643 - protein, 284 aa, Homo sapiens
IPAFFLCKTAVLTAFANGRSTGLILDSGATHTTAIPVHDGYVLQQGIVKSPLAGDFITMQCRELFQEMNIELVPPYMIASKEAVREGSPANWKRKEKLPQVTRSWHNYMCNCVIQDFQASVLQVSDSTYDEQVAAQMPTVHYEFPNGYNCDFGAERLKIPEGLFDPSNVKGLSGNTMLGVSHVVTTSVGMCDIDIRPGLYGSVIVAGGNTLIQSFTDRLNRELSQKTPPSMRLKLIANNTTVERRFSSWIGGSILASLGTFQQMWISKQEYEEGGKQCVERKCP

SEQ ID NO: 70644 - protein, 713 aa, Homo sapiens
KNIFFRFFFLSLISEIEEIFSTDLVPGDVMVIPLNGTIMPCDAVLINGTCIVNESMLTGESVPVTKTNLPNPSVDVKGIGDELYNPETHKRHTLFCGTTVIQTRFYTGELVKAIVVRTGFSTSKGQLVRSILYPKPTDFKLYRDAYLFLLCLVAVAGIGFIYTIINSILNEVQVGVIIIESLDIITITVPPALPAAMTAGIVYAQRRLKKIGIFCISPQRINICGQLNLVCFDKTGTLTEDGLDLWGIQRVENARFLSPEENVCNEMLVKSQFVACMATCHSLTKIEGVLSGDPLDLKMFEAIGWILEEATEEETALHNRIMPTVVRPPKQLLPESTPAGNQEMELFELPATYEIGIVRQFPFSSALQRMSVVARVLGDRKMDAYMKGAPEAIAGLCKPETVPVDFQNVLEDFTKQGFRVIALAHRKLESKLTWHKVQNISRDAIENNMDFMGLIIMQNKLKQETPAVLEDLHKANIRTVMVTGDSMLTAVSVARDCGMILPQDKVIIAEALPPKDGKVAKINWHYADSLTQCSHPSAIDPEAIPVKLVHDSLEDLQMTRYHFAMNGKSFSVILEHFQDLVPKLMLHGTVFARMAPDQKTQLIEALQNVDYFVGMCGDGANDCGALKRAHGGISLSELEASVASPFTSKTPSISCVPNLIREGRAALITSFCELALFSIVTYSLDHFIISILISNMLVLFFSDFHNCAFYSLV

SEQ ID NO: 70645 - protein, 15 aa, Homo sapiens
ILMNVEFFLSLFFSF

SEQ ID NO: 70646 - protein, 165 aa, Homo sapiens
INDASRGTLSSYSLVLMVLHYLQTLPEPILPSLQKIYPESFSPAIQLHLVHQAPCNVPPYLSKNESNLGDLLLGFLKYYATEFDWNSQMISVREAKAIPRPDGIEWRNKYICVEEPFDGTNTARAVHEKQKFDMIKDQFLKSWHRLKNKRDLNSILPVRAAVLKR

SEQ ID NO: 70647 - protein, 32 aa, Homo sapiens
LQFFFSILNIFLFTADPLPYDFIGKQGPAIIC

SEQ ID NO: 70648 - protein, 228 aa, Homo sapiens
LLVRPRPGTGLGRVMRTLLLVLWLATRGSALYFHIGETEKKCFIEEIPDETMVIGNYRTQLYDKQREEYQPATPGLGMFVEVKDPEDKVILARQYGSEGRFTFTSHTPGEHQICLHSNSTKFSLFAGGMLRVHLDIQVGEHANDYAEIAAKDKLSELQLRVRQLVEQVEQIQKEQNYQRWREERFRQTSESTNQRVLWWSILQTLILVAIGVWQMRHLKSFFEAKKLV

SEQ ID NO: 70649 - protein, 60 aa, Homo sapiens
ILVFVAVEILLTFKIKVMALNSAEKITKFLENIPQDSSDAIVSKAIDLWHKHCGTPVHSS

SEQ ID NO: 70650 - protein, 55 aa, Homo sapiens
VAGATSLVTLLLAVPITVLAVLALVPQDQGGLGFRSCQRRSQKQISAPGSQLPTS

SEQ ID NO: 70651 - protein, 25 aa, Homo sapiens
MFVVATLLVTAKMTHQWKQLASLLR

SEQ ID NO: 70652 - protein, 25 aa, Homo sapiens
MFVVATLLVTAKMTHQWKQLASLLR

SEQ ID NO: 70653 - protein, 26 aa, Homo sapiens
LAFALGWCWKLLVVARSLLHCKGVRI

SEQ ID NO: 70654 - protein, 110 aa, Homo sapiens
KAADVWSLGVMLYTLLVGRYPFHDSDPSALFSKIRRGQFCIPEHISPKARCLIRSLLRREPSERLTAPEILLHPWFESVLEPGYIDSEIGTSDQIVPEYQEDSDISSFFC

SEQ ID NO: 70655 - protein, 33 aa, Homo sapiens
INLAFGFAVTLGILIAGQVSGKALTLPPALGPQ

SEQ ID NO: 70656 - protein, 38 aa, Homo sapiens
IAGVFVYQLMIGCHLEQPPPSNEEENVKLAHVKHKEQI

SEQ ID NO: 70657 - protein, 30 aa, Homo sapiens
KTLHLGTLFFLFYLALTQNEENICDGKVTL

SEQ ID NO: 70658 - protein, 641 aa, Homo sapiens
IFFGFSSSFIFLPKLLLVGEKKMPQLNGGGGDDLGANDELISFKDEGEQEEKSSENSSAERDLADVKSSLVNESETNQNSSSDSEAERRPPPRSESFRDKSRESLEEAAKRQDGGLFKGPPYPGYPFIMIPDLTSPYLPNGSLSPTARTLHFQSGSTHYSAYKTIEHQIAVQYLQMKWPLLDVQAGSLQSRQALKDARSPSPAHIVSNKVPVVQHPHHVHPLTPLITYSNEHFTPGNPPPHLPADVDPKTGIPRPPHPPDISPYYPLSPGTVGQIPHPLGWLVPQQGQPVYPITTGGFRHPYPTALTVNASMSRFPPHMVPPHHTLHTTGIPHPAIVTPTVKQESSQSDVGSLHSSKHQDSKKEEEKKKPHIKKPLNAFMLYMKEMRAKVVAECTLKESAAINQILGRRWHALSREEQAKYYELARKERQLHMQLYPGWSARDNYGKKKKRKRDKQPGETNEHSECFLNPCLSLPPITDLSAPKKCRARFGLDQQNNWCGPCRRKKKCVRYIQGEGSCLSPPSSDGSLLDSPPPSPNLLGSPPRDAKSQTEQTQPLSLSLKPDPLAHLSMMPPPPALLLAEATHKASALCPNGALDLPPAALQPAAPSSSIAQPSTSSLHSHSSLAGTQPQPLSLVTKSLE

SEQ ID NO: 70659 - protein, 54 aa, Homo sapiens
LFFLSMVCGWIIYGSFICKCKFFLQQAHTSTPISTFPCKPLYITFWLGDYKPYS

SEQ ID NO: 70660 - protein, 37 aa, Homo sapiens
ILGVGVGVAIIELLGMVLSICLCRHVHSEDYSKVPKY

SEQ ID NO: 70661 - protein, 446 aa, Homo sapiens
LLLLFWLGWLGMLAGAVVIIVRAPRCRELPAQKWWHTGALYRIGDLQAFQGHGAGNLAGLKGRLDYLSSLKVKGLVLGPIHKNQKDDVAQTDLLQIDPNFGSKEDFDSLLQSAKKKSIRVILDLTPNYRGENSWFSTQVDTVATKVKDALEFWLQAGVDGFQVRDIENLKDASSFLAEWQNITKGFSEDRLLIAGTNSSDLQQILSLLESNKDLLLTSSYLSDSGSTGEHTKSLVTQYLNATGNRWCSWSLSQARLLTSFLPAQLLRLYQLMLFTLPGTPVFSYGDEIGLDAAALPGQPMEAPVMLWDESSFPDIPGAVSANMTVKGQSEDPGSLLSLFRRLSDQRSKERSLLHGDFHAFSAGPGLFSYIRHWDQNERFLVVLNFGDVGLSAGLQASDLPASASLPAKADLLLSTQPGREEGSPLELERLKLEPHEGLLLRFPYAA

SEQ ID NO: 70662 - protein, 15 aa, Homo sapiens
VCWSCYLLLHFLGLV

SEQ ID NO: 70663 - protein, 44 aa, Homo sapiens
KPPVFLHLALLYLQAGSPEIPAPNPPCTLGPALLPPERTFLQLF

SEQ ID NO: 70664 - protein, 137 aa, Homo sapiens
LLGLLLLGLLLPASLTGGVGSLNLEELSEMRYGIEILPLPVMGGQSQSSDVVIVSSKYKQRYECRLPAGAIHFQREREEETPAYQGPGIPELLSPMRDAPCLLKTKDWWTYEFCYGRHIQQYHMEDSEIKGLQAASS

SEQ ID NO: 70665 - protein, 13 aa, Homo sapiens
MTLSRSLFFILFF

SEQ ID NO: 70666 - protein, 53 aa, Homo sapiens
IFIVFAVHFYRSLVSHKTDRQFQELNELAEFARLQDQLDHRGDHPLTPGSHYA

SEQ ID NO: 70667 - protein, 1050 aa, Homo sapiens
LTLCPVLHVAFLVSFSGGVAAAATRAGGASRCSFIRPHFLFRFHPSLPISFSLSPPASHPSPPPRNPLLPPSTGAMAAEEVLQTVDHYKTEIERLTKELTETTHEKIQAAEYGLVVLEEKLTLKQQYDELEAEYDSLKQELEQLKEAFGQSFSIHRKVAEDGETREETLLQESASKEAYYLGKILEMQNELKQSRAVVTNVQAENERLTAVVQDLKENNEMVELQRIRMKDEIREYKFREARLLQDYTELEEENITLQKLVSTLKQNQVEYEGLKHEIKRFEEETVLLNSQLEDAIRLKEIAEHQLEEALETLKNEREQKNNLRKELSQYISLNDNHISISVDGLKFAEDGSEPNNDDKMNGHIHGPLVKLNGDYRTPTLRKGESLNPVSDLFSELNISEIQKLKQQLMQVEREKAILLANLQESQTQLEHTKGALTEQHERVHRLTEHVNAMRGLQSSKELKAELDGEKGRDSGEEAHDYEVDINGLEILECKYRVAVTEVIDLKAEIKALKEKYNKSVENYTDEKAKYESKIQMYDEQVTSLEKTTKESGEKMAHMEKELQKMTSIANENHSTLNTAQDELVTFSEELAQLYHHVCLCNNETPNRVMLDYYRQSRVTRSGSLKGPDDPRGLLSPRLARRGVSSPVETRTSSEPVAKESTEASKEPSPTKTPTISPVITAPPSSPVLDTSDIRKEPMNIYNLNAIIRDQIKHLQKAVDRSLQLSRQRAAARELAPMIDKDKEALMEEILKLKSLLSTKREQIATLRAVLKANKQTAEVALANLKNKYENEKAMVTETMTKLRNELKALKEDAATFSSLRAMFATRCDEYVTQLDEMQRQLAAAEDEKKTLNTLLRMAIQQKLALTQRLEDLEFDHEQSRRSKGKLGKSKIGSPKVSGEASVTVPTIDTYLLHSQGPQTPNIRVSSGTQRKRQFSPSLCDQSRPRTSGASYLQNLLRVPPDPTSTESFLLKGPPSMSEFIQGHRLSKEKRLTVAPPDCQQPAASVPPQCSQLAGRQDCPTVSPDTALPEEQPHSSSQCAPLHCLSKPPHP

SEQ ID NO: 70668 - protein, 70 aa, Homo sapiens
LHVIWSYLIARIALKALIRGKVSKDDRSDVESSSEEEDVTTCTKSPCDSSSSNGANRVNGHMGGSYWAEE

SEQ ID NO: 70669 - protein, 17 aa, Homo sapiens
KIQHSDISSLLILVCST

SEQ ID NO: 70670 - protein, 577 aa, Homo sapiens
LRWALSVLCVLLMAETVSGTRGSSTGAHISPQFPASGVNQTPVVDCRKVCGLNVSDRCDFIRTNPDCHSDGGYLDYLEGIFCHFPPSLLPLAVTLYVSWLLYLFLILGVTAAKFFCPNLSAISTTLKLSHNVAGVTFLAFGNGAPDIFSALVAFSDPHTAGLALGALFGAGVLVTTVVAGGITILHPFMAASRPFFRDIVFYMVAVFLTFLMLFRGRVTLAWALGYLGLYVFYVVTVILCTWIYQRQRRGSLFCPMPVTPEILSDSEEDRVSSNTNSYDYGDEYRPLFFYQETTAQILVRALNPLDYMKWRRKSAYWKALKVFKLPVEFLLLLTVPVVDPDKDDQNWKRPLNCLHLVISPLVVVLTLQSGTYGVYEIGGLVPVWVVVVIAGTALASVTFFATSDSQPPRLHWLFAFLGFLTSALWINAAATEVVNILRSLGVVFRLSNTVLGLTLLAWGNSIGDAFSDFTLARQGYPRMAFSACFGGIIFNILVGVGLGCLLQISRSHTEVKLEPDGLLVWVLAGALGLSLVFSLVSVPLQCFQLSRVYGFCLLLFYLNFLVVALLTEFGVIHLKSM

SEQ ID NO: 70671 - protein, 47 aa, Homo sapiens
IKNNKEAFSVVGSVLYFTNFCLDKLGQPLLNENPQLSEGWEIPKYPT

SEQ ID NO: 70672 - protein, 135 aa, Homo sapiens
KFISGILAALSAMISLEIPQVNIMTKMDLLSKKAKKEIEKFLDPDMYSLLEDSTSDLRSKKFKKLTKAICGLIDDYSMVRFLPYDQSDEESMNIVLQHIDFAIQYGEDLEFKEPKEREDESSSMFDEYFQECQDE

SEQ ID NO: 70673 - protein, 14 aa, Homo sapiens
LSLPMLMFMALTFW

SEQ ID NO: 70674 - protein, 38 aa, Homo sapiens
MAARVFYLLLVLSAQQILHVKQEKPYGRLLIQPGPRFH

SEQ ID NO: 70675 - protein, 19 aa, Homo sapiens
IYTVLSALSFLQWCRVQCS

SEQ ID NO: 70676 - protein, 30 aa, Homo sapiens
LVVGSLCILTGFVMLVVYIRYQDQDDDDEE

SEQ ID NO: 70677 - protein, 11 aa, Homo sapiens
IRTLSLLIVTA

SEQ ID NO: 70678 - protein, 30 aa, Homo sapiens
ILKVLFPSWSSQNALMFLTLLCLTLLAEEL

SEQ ID NO: 70679 - protein, 13 aa, Homo sapiens
RARCRALFLVFII

SEQ ID NO: 70680 - protein, 332 aa, Homo sapiens
LMFAVIVASSGLLLMIERGILAEMKPLPLHPPGREGTAWRGKAPKPGGLSLRAGDADLQVRQDVRNRTLRAVCGQPGMPRDPWDLPVGQRRTLLRHILVSDRYRFLYCYVPKVACSNWKRVMKVLAGVLDSVDVRLKMDHRSDLVFLADLRPEEIRYRLQHYFKFLFVREPLERLLSAYRNKFGEIREYQQRYGAEIVRRYRAGAGPSPAGDDVTFPEFLRYLVDEDPERMNEHWMPVYHLCQPCAVHYDFVGSYERLEADANQVLEWVRAPPHVRFPARQAWYRPASPESLHYHLCSAPRALLQDVLPKYILDFSLFAYPLPNVTKEACQQ

SEQ ID NO: 70681 - protein, 602 aa, Homo sapiens
ICALFTLVTVLLWNKCSSDKAIQFPRRSSSGFRVDGFEKRAAASESNNYMNHVAKQQSEEAFPQEQQKAPPVVGGFNSNVGSKVLGLKYEEIDCLINDEHTIKGRREGNEVFLPFTWVEKYFDVYGKVVQYDGYDRFEFSHSYSKVYAQRAPYHPDGVFMSFEGYNVEVRDRVKCISGVEGVPLSTQWGPQGYFYPIQIAQYGLSHYSKNLTEKPPHIEVYETAEDRDKNKPNDWTVPKGCFMANVADKSRFTNVKQFIAPETSEGVSLQLGNTKDFIISFDLKFLTNGSVSVVLETTEKNQLFTIHYVSNAQLIAFKERDIYYGIGPRTSWSTVTRDLVTDLRKGVGLSNTKAVKPTKIMPKKVVRLIAKGKGFLDNITISTTAHMAAFFAASDWLVRNQDEKGGWPIMVTRKLGEGFKSLEPGWYSAMAQGQAISTLVRAYLLTKDHIFLNSALRATAPYKFLSEQHGVKAVFMNKHDWYEEYPTTPSSFVLNGFMYSLIGLYDLKETAGEKLGKEARSLYERGMESLKAMLPLYDTGSGTIYDLRHFMLGIAPNLARWDYHTTHINQLQLLSTIDESPVFKEFVKRWKSYLKGSRAKHN

SEQ ID NO: 70682 - protein, 747 aa, Homo sapiens
VLLRVLILLLSWAAGMGGQYGNPLNKYIRHYEGLSYNVDSLHQKHQRAKRAVSHEDQFLRLDFHAHGRHFNLRMKRDTSLFSDEFKVETSNKVLDYDTSHIYTGHIYGEEGSFSHGSVIDGRFEGFIQTRGGTFYVEPAERYIKDRTLPFHSVIYHEDDINYPHKYGPQGGCADHSVFERMRKYQMTGVEEVTQIPQEEHAANGPELLRKKRTTSAEKNTCQLYIQTDHLFFKYYGTREAVIAQISSHVKAIDTIYQTTDFSGIRNISFMVKRIRINTTADEKDPTNPFRFPNIGVEKFLELNSEQNHDDYCLAYVFTDRDFDDGVLGLAWVGAPSGSSGGICEKSKLYSDGKKKSLNTGIITVQNYGSHVPPKVSHITFAHEVGHNFGSPHDSGTECTPGESKNLGQKENGNYIMYARATSGDKLNNNKFSLCSIRNISQVLEKKRNNCFVESGQPICGNGMVEQGEECDCGYSDQCKDECCFDANQPEGRKCKLKPGKQCSPSQGPCCTAQCAFKSKSEKCRDDSDCAREGICNGFTALCPASDPKPNFTDCNRHTQVCINGQCAGSICEKYGLEECTCASSDGKDDKELCHVCCMKKMDPSTCASTGSVQWSRHFSGRTITLQPGSPCNDFRGYCDVFMRCRLVDADGPLARLKKAIFSPELYENIAEWIVAHWWAVLLMGIALIMLMAGFIKICSVHTPSSNPKLPPPKPLPGTLKRRRPPQPIQQPQRQRPRESYQMGHMRR

SEQ ID NO: 70683 - protein, 654 aa, Homo sapiens
LFLWGQALYIIAKLLADELISPKDIDPVQRYVPLKDQRNVSMRFSNQGPLENDLVVHVALIAESQRLQVFLNTYGIQTQTPQQVEPIQIWPQQELVKAYLQLGINEKLGLSGRPDRPIGCLGTSKIYRILGKTVVCYPIIFDLSDFYMSQDVFLLIDDIKNALQFIKQYWKMHGRPLFLVLIREDNIRGSRFNPILDMLAALKKGIIGGVKVHVDRLQTLISGAVVEQLDFLRISDTEELPEFKSFEELEPPKHSKVKRQSSTPSAPELGQQPDVNISEWKDKPTHEILQKLNDCSCLASQAILLGILLKREGPNFITKEGTVSDHIERVYRRAGSQKLWSVVRRAASLLSKVVDSLAPSITNVLVQGKQVTLGAFGHEEEVISNPLSPRVIQNIIYYKCNTHDEREAVIQQELVIHIGWIISNNPELFSGMLKIRIGWIIHAMEYELQIRGGDKPALDLYQLSPSEVKQLLLDILQPQQNGRCWLNRRQIDGSLNRTPTGFYDRVWQILERTPNGIIVAGKHLPQQPTLSDMTMYEMNFSLLVEDTLGNIDQPQYRQIVVELLMVVSIVLERNPELEFQDKVDLDRLVKEAFNEFQKDQSRLKEIEKQDDMTSFYNTPPLGKRGTCSYLTKAVMNLLLEGEVKPNNDDPCLIS

SEQ ID NO: 70684 - protein, 13 aa, Homo sapiens
IRPMRSMFYLLGI

SEQ ID NO: 70685 - protein, 22 aa, Homo sapiens
KPIVFVLHTFLSAKVTRMGLLV

SEQ ID NO: 70686 - protein, 26 aa, Homo sapiens
LWYIVPLVVVYFAEYFINQGLVSEGC

SEQ ID NO: 70687 - protein, 72 aa, Homo sapiens
MSALILTACIIWCICSIKSNRHKDGFHRLRQHHDEYEDEIRMMSTGSKKSLLSHEFQDETDTEEETLYSSKH

SEQ ID NO: 70688 - protein, 198 aa, Homo sapiens
MFFAPTVLGLARLRHWVYLLCFSAGNYYNQGETRKKELLQSCDVLGIPLSSVMIIDNRDFPDDPGMQWDTEHVARVLLQHIEVNGINLVVTFDAGGVSGHSNHIALYAAVRALHSEGKLPKGCSVLTLQSVNVLRKYISLLDLPLSLLHTQDVLFVLNSKEVAQAKKAMSCHRSQLLWFRRLYIIFSRYMRINSLSFL

SEQ ID NO: 70689 - protein, 1067 aa, Homo sapiens
IHNYSWLLFAALALYSAHLASAEDVDGEKLDPQTRSSATTLRSQCMQLVGDCLMKAHQGKGLKALALLGVLPDGDSSLEDQALPVTVPTGASEEQLEKKAVQGAELSEAGNGKRAVHEEIRPVDFKQRNKADKGVSLSKDPSCQTQISDSPADASPPTGLPDAEDSEVSSQKPIEEKAVTPSPEQVFAECSQKRILGLLAAMLPPLKSGPTVPLIDLEHVLPLMFQVVISNAGHLNETYHLTLGLLGQLIIRLLPAEVDAAVIKVLSAKHNLFAAGDSSIVPDGWKTTHLLFSLGAVCLDSRVGLDWACSMAEILRSLNSAPLWRDVIATFTDHCIKQLPFQLKHTNIFTLLVLVGFPQVLCVGTRCVYMDNANEPHNVIILKHFTEKNRAVIVDVKTRKRKTVKDYQLVQKGGGQECGDSRAQLSQYSQHFAFIASHLLQSSMDSHCPEAVEATWVLSLALKGLYKTLKAHGFEEIRATFLQTDLLKLLVKKCSKGTGFSKTWLLRDLEILSIMLYSSKKEINALAEHGDLELDERGDREEEVERPVSSPGDPEQKKLDPLEGLDEPTRICFLMAHDALNAPLHILRAIYELQMKKTDYFFLEVQKRFDGDELTTDERIRSLAQRWQPSKSLRLEEQSAKAVDTDMIILPCLSRPARCDQATAESNPVTQKLISSTESELQQSYAKQRRSKSAALLHKELNCKSKRAVRDYLFRVNEATAVLYARHVLASLLAEWPSHVPVSEDILELSGPAHMTYILDMFMQLEEKHEWEKILQKVLQGCREDMLGTMALAACQFMEEPGMEVQVRESKHPYNNNTNFEDKVHIPGAIYLSIKFDSQCNTEEGCDELAMSSSSDFQQDRHSFSGSQQKWKDFELPGDTLYYRFTSDMSNTEWGYRFTVTAGHLGRFQTGFEILKQMLSEERVVPHLPLAKIWEWLVGVACRQTGHQRLKAIHLLLRIVRCCGHSDLCDLALLKPLWQLFTHMEYGLFEDVTQPGILLPLHRALTELFFVTENRAQELGVLQDYLLALTTDDHLLRCAAQALQNIAAISLAINYPNKATRLWNVEC

SEQ ID NO: 70690 - protein, 21 aa, Homo sapiens
VSTRCFVVSVFLLFTLPESVL

SEQ ID NO: 70691 - protein, 24 aa, Homo sapiens
ICLFLLALVLAWEASPHYPTPPAP

SEQ ID NO: 70692 - protein, 72 aa, Homo sapiens
KDGIIMIQTLLIILFIIVPIFLLLDKDDSKAGMEEDHTYEGLDIDQTATYEDIVTLRTGEVKWSVGEHPGQE

SEQ ID NO: 70693 - protein, 87 aa, Homo sapiens
LTLLLPGLGIFGSTSTVTLPETLLFVSTLDGSLHAVSKRTGSIKWTLKEGNLDLVLGRHGHLLNWFHRNIFWRKRKHYSLSNKINKK

SEQ ID NO: 70694 - protein, 135 aa, Homo sapiens
LQLSRASMAAWKSWTALRLCATVVVLDMVVCKGFVEDLDESFKENRNDDIWLVDFYAPWCGHCKKLEPIWNEVGLEMKSIGSPVKVGKMDATSYSSIASEFGVRGYPTIKLRFPGGLKIGVWPFFIGEIKRGLGI

SEQ ID NO: 70695 - protein, 65 aa, Homo sapiens
IVLLVFLCLGVFLLWKNWRLKNINSINFDNPVYQKTTEDEVHICHNQDGYSYPSRQMVSLEDDVA

SEQ ID NO: 70696 - protein, 43 aa, Homo sapiens
ILFLGASMVYLIRVARRNQERALRTVWSSGDDKEQLVKNTYVL

SEQ ID NO: 70697 - protein, 14 aa, Homo sapiens
LVRFYKILLGWFFF

SEQ ID NO: 70698 - protein, 63 aa, Homo sapiens
IVIGVLLLTAAAVGGALLWRRMRSGLPAPWISLRGDDTGVLLPTPGEAQDADLKDVNVIPATA

SEQ ID NO: 70699 - protein, 38 aa, Homo sapiens
MVHLLVLSGAWGMQMWVTFVSGRDPQLGCHGYLGWGWK

SEQ ID NO: 70700 - protein, 134 aa, Homo sapiens
LLGGSLGLMFCLIALSTDFWFEAVGPTHSAHSGLWPTGHGDIISGHGPLVSTTAAFAAGKDSGLDWGIASQRIPAEELSHLSCPCPQPSPWWWPWRCTPASGGTSLHTPRSRPSSPGPSTWAGSQLSSCSVQVP

SEQ ID NO: 70701 - protein, 56 aa, Homo sapiens
LGKFHSIVRLVAFCPFASSQVALENANAVSEDLNAVVPMAGPGFAVMTCESNLSIP

SEQ ID NO: 70702 - protein, 56 aa, Homo sapiens
LPFKKSLLAALILCLLVVRFDPASPSSLHFLYKLAQLFRWIRKAAFSRLYQLRIRD

SEQ ID NO: 70703 - protein, 194 aa, Homo sapiens
ISFVLLDTGMGLGAAAAVAGITCSVVELVNKLRARAQARNLDQSGTNVAKVMKEFVGGNTPNVLTLVDNWYQVTQGIGRNIRAIRRARANPQLGAYAPPPHVIGRISAEGGEQVERVVEGPAQAMSRGTMIVGAATGGILLLLDVVSLAYESKHLLEGAKSESAEELKKRAQELEGKLNFLTKIHEMLQPGQDQ

SEQ ID NO: 70704 - protein, 17 aa, Homo sapiens
LWKYKKLFLFQMLWIQT

SEQ ID NO: 70705 - protein, 26 aa, Homo sapiens
LLLFLVFVIVLFFIYHFMQAEEGNPF

SEQ ID NO: 70706 - protein, 22 aa, Homo sapiens
VLGLLLLTIISLSLPAFIFSPI

SEQ ID NO: 70707 - protein, 198 aa, Homo sapiens
MSYNEKSDIWSLGCLLYELCALMPPFTAFSQKELAGKIREGKFRRIPYRYSDELNEIITRMLNLKDYHRPSVEEILENPLIADLVADEQRRNLERRGRQLGEPEKSQDSSPVLSELKLKEIQLQERERALKAREERLEQKEQELCVRERLAEDKLARAENLLKNYSLLKERKFLSLASNPESHFVAQAGMQWCDHSSM

SEQ ID NO: 70708 - protein, 255 aa, Homo sapiens
MSYNEKSDIWSLGCLLYELCALMPPFTAFSQKELAGKIREGKFRRIPYRYSDELNEIITRMLNLKDYHRPSVEEILENPLIADLVADEQRRNLERRGRQLGEPEKSQDSSPVLSELKLKEIQLQERERALKAREERLEQKEQELCVRERLAEDKLARAENLLKNYSLLKERKFLSLASNPELLNLPSSVIKKKVHFSGESKENIMRSENSESQLTSKSKCKDLKKRLHAAQLRAQALSDIEKNYQLKSRQILGMR

SEQ ID NO: 70709 - protein, 194 aa, Homo sapiens
MSYNEKSDIWSLGCLLYELCALMPPFTAFSQKELAGKIREGKFRRIPYRYSDELNEIITRMLNLKDYHRPSVEEILENPLIADLVADEQRRNLERRGRQLGEPEKSQDSSPVLSELKLKEIQLQERERALKAREERLEQKEQELCVRERLAEDKLARAENLLKNYSLLKERKFLSLASNPGMRINLVNRSWCYK

SEQ ID NO: 70710 - protein, 187 aa, Homo sapiens [sequence omitted]

SEQ ID NO: 70711 - protein, 599 aa, Homo sapiens
LVTLCFGALFLLPHSSRLKRLFLAPRTQQPGLEVVAEIAGHAPAREQEPPPNPAPAAPAPGEDDPSSWASPRRRKGGLRRTRPTGPREEATAARGNSIPASRPGDEGVPFRFDFNAFRSRLRHPVLGTRADESQEPQSQVRAQREKIKEMMQFAWQSYKRYAMGKNELRPLTKDGYEGNMFGGLSGATVIDSLDTLYLMELKEEFQEAKAWVGESFHLNVSGEASLFEVNIRYIGGLLSAFYLTGEEVFRIKAIRLGEKLLPAFNTPTGIPKGVVSFKSGNWGWATAGSSSILAEFGSLHLEFLHLTELSGNQVFAEKVRNIRKVLRKIEKPFGLYPNFLSPVSGNWVQHHVSVGGLGDSFYEYLIKSWLMSGKTDMEAKNMYYEALEAIETYLLNVSPGGLTYIAEWRGGILDHKMGHLACFSGGMIALGAEDAKEEKRAHYRELAAQITKTCHESYARSDTKLGPEAFWFNSGREAVATQLSESYYILRPEVVESYMYLWRQTHNPIYREWGWEVVLALEKYCRTEAGFSGIQDVYSSTPNHDNKQQSFFLAETLKYLYLLFSEDDLLSLEDWVFNTEAHPLPVNHSDSSGRAWGRH

SEQ ID NO: 70712 - protein, 32 aa, Homo sapiens
IVTACVLCYLFISSKPHTKLDLGLSLQTAGGS

SEQ ID NO: 70713 - protein, 11 aa, Homo sapiens
LGILLYTMLAG

SEQ ID NO: 70714 - protein, 21 aa, Homo sapiens
KSQSRHRNMPLIQCLCLAVTC

SEQ ID NO: 70715 - protein, 999 aa, Homo sapiens
RGRTERRIPRLWRLLLWAGTAFQVTQGTGPELHACKESEYHYEYTACDSTGSRWRVAVPHTPGLCTSLPDPIKGTECSFSCNAGEFLDMKDQSCKPCAEGRYSLGTGIRFDEWDELPHGFASLSANMELDDSAAESTGNCTSSKWVPRGDYIASNTDECTATLMYAVNLKQSGTVNFEYYYPDSSIIFEFFVQNDQCQPNADDSRWMKTTEKGWEFHSVELNRGNNVLYWRTTAFSVWTKVPKPVLVRNIAITGVAYTSECFPCKPGTYADKQGSSFCKLCPANSYSNKGETSCHQCDPDKYSEKGSSSCNVRPACTDKDYFYTHTACDANGETQLMYKWAKPKICSEDLEGAVKLPASGVKTHCPPCNPGFFKTNNSTCQPCPYGSYSNGSDCTRCPAGTEPAVGFEYKWWNTLPTNMETTVLSGINFEYKGMTGWEVAGDHIYTAAGASDNDFMILTLVVPGFRPPQSVMADTENKEVARITFVFETLCSVNCELYFMVGVNSRTNTPVETWKGSKGKQSYTYIIEENTTTSFTWAFQRTTFHEASRKYTNDVAKIYSINVTNVMNGVASYCRPCALEASDVGSSCTSCPAGYYIDRDSGTCHSCPTNTILKAHQPYGVQACVPCGPGTKNNKIHSLCYNDCTFSRNTPTRTFNYNFSALANTVTLAGGPSFTSKGLKYFHHFTLSLCGNQGRKMSVCTDNVTDLRIPEGESGFSKSITAYVCQAVIIPPEVTGYKAGVSSQPVSLADRLIGVTTDMTLDGITSPAELFHLESLGIPDVIFFYRSNDVTQSCSSGRSTTIRVRCSPQKTVPGSLLLPGTCSDGTCDGCNFHFLWESAAACPLCSVADYHAIVSSCVAGIQKTTYVWREPKLCSGGISLPEQRVTICKTIDFWLKVGISAGTCTAILLTVLTCYFWKKNQKLEYKYSKLVMNATLKDCDLPAADSCAIMEGEDVEDDLIFTSKKSLFGKIKSFTSKRTPDGFDSVPLKTSSGGLDMDL

SEQ ID NO: 70716 - protein, 34 aa, Homo sapiens
KSRVEEVDGSLVRILFLVLFFSTILEAEVGGGGT

SEQ ID NO: 70717 - protein, 61 aa, Homo sapiens
IFLCVWMFIGIILTALIKSDLRRHNINIGITNVDVKAIPADSPTDQEPKTVMLSKQSESAI

SEQ ID NO: 70718 - protein, 69 aa, Homo sapiens
VAACVLLLTSAQLGLHIWQLRSQCMWPRETQLLLEVPPSTEDARSCQFPEEERGERSAEEKGRLGDLWV

SEQ ID NO: 70719 - protein, 22 aa, Homo sapiens
VIVGFAAFAYTVKYVLRSIAQE

SEQ ID NO: 70720 - protein, 307 aa, Homo sapiens
VVILVLLLVAGALTALLPSVKEDKMLMLRREIKSQGKSTMDSFTLIMQTYNRTDLLLKLLNHYQAVPNLHKVIVVWNNIGEKAPDELWNSLGPHPIPVIFKQQTANRMRNRLQVFPELETNAVLMVDDDTLISTPDLVFAFSVWQQFPDQIVGFVPRKHVSTSSGIYSYGSFEMQAPGSGNGDQYSMVLIGASFFNSKYLELFQRQPAAVHALIDDTQNCDDIAMNFIIAKHIGKTSGIFVKPVNMDNLEKETNSGYSGMWHRAEHALQRSYCINKLVNIYDSMPLRYSNIMISQFGFPYANYKRKI

SEQ ID NO: 70721 - protein, 19 aa, Homo sapiens
LTPTSNFSLLLLLLFSLLL

SEQ ID NO: 70722 - protein, 114 aa, Homo sapiens
IFTLAVLLSSTLVYNSMGTINQQAMDQLYYVTELTHRIRSKSSPDENENEDSADFVSFFPDFVWTLRDFSLDLEADGQPLTPDEYLEYSLKLTQGNRDVPLINEDDKTLEIIIF

SEQ ID NO: 70723 - protein, 31 aa, Homo sapiens
KGILNAISSLLALGHFLLDPALLSAIVKDQP

SEQ ID NO: 70724 - protein, 33 aa, Homo sapiens
MAVALGAPGLMLLGGGLVLLLHHKKYSEYQSIN

SEQ ID NO: 70725 - protein, 35 aa, Homo sapiens
IPYLTALGDLLGTGLLALSFHVLWLIGDRDTDVGD

SEQ ID NO: 70726 - protein, 416 aa, Homo sapiens
LKVWLGIMLPVLGIKSLSPFAITYLDRLLLMHPNLTKGFGMIGPKDFFPLLDFAYMPNNSLTPSLQEQLCQLYPRLKVLAFGAKPDSTLHTYFPSFLSRATPSCPPEMKKELLSSLTECLTVDPLSASVWRQLYPKHLSQSSLLLEHLLSSWEQIPKKVQKSLQETIQSLKLTNQELLRKGSSNNQDVVTCDMACKGLLQQVQGPRLPWTRLLLLLLVFAVGFLCHDLRSHSSFQASLTGRLLRSSGFLPASQQACAKLYSYSLQGYSWLGETLPLWGSHLLTVVRPSLQLAWAHTNATVSFLSAHCASHLAWFGDSLTSLSQRLQIQLPDSVNQLLRYLRELPLLFHQNVLLPLWHLLLEALAWAQEHCHEACRGEVTWDCMKTQLSEAVHWTWLCLQDITVAFLDWALALISQQ

SEQ ID NO: 70727 - protein, 398 aa, Homo sapiens
IMVGTAGISLLLLWYHKVRKPGIAMKLPEFLSLGNTFNSITLQDEIHDDQGTTVIFQERQLQILEKLNELLTNMEELKEEIRFLKEAIPKLEEYIQDELGGKITVHKISPQHRARKRRLPTIQSSATSNSSEEAESEGGYITANTDTEEQSFPVPKAFNTRVEELNLDVLLQKVDHLRMSESGKSESFELLRDHKEKFRDEIEFMWRFARAYGDMYELSTNTQEKKHYANIGKTLSERAINRAPMNGHCHLWYAVLCGYVSEFEGLQNKINYGHLFKEHLDIAIKLLPEEPFLYYLKGRYCYTVSKLSWIEKKMAATLFGKIPSSTVQEALHNFLKAEELCPGYSNPNYMYLAKCYTDLEENQNALKFCNLALLLPTVTKEDKEAQKEMQKIMTSLKR

SEQ ID NO: 70728 - protein, 22 aa, Homo sapiens
RLLIFPLYICCNFLYISPEKKN

SEQ ID NO: 70729 - protein, 10 aa, Homo sapiens
IIIMLYLNYL

SEQ ID NO: 70730 - protein, 1040 aa, Homo sapiens
LRLGPRGLPLLLSGLLLPLCRAFNLDVDSPAEYSGPEGSYFGFAVDFFVPSASSRMFLLVGAPKANTTQPGIVEGGQVLKCDWSSTRRCQPIEFDATGNRDYAKDDPLEFKSHQWFGASVRSKQDKILACAPLYHWRTEMKQEREPVGTCFLQDGTKTVEYAPCRSQDIDADGQGFCQGGFSIDFTKADRVLLGGPGSFYWQGQLISDQVAEIVSKYDPNVYSIKYNNQLATRTAQAIFDDSYLGYSVAVGDFNGDGIDDFVSGVPRAARTLGMVYIYDGKNMSSLYNFTGEQMAAYFGFSVAATDINGDDYADVFIGAPLFMDRGSDGKLQEVGQVSVSLQRASGDFQTTKLNGFEVFARFGSAIAPLGDLDQDGFNDIAIAAPYGGEDKKGIVYIFNGRSTGLNAVPSQILEGQWAARSMPPSFGYSMKGATDIDKNGYPDLIVGAFGVDRAILYRARPVITVNAGLEVYPSILNQDNKTCSLPGTALKVSCFNVRFCLKADGKGVLPRKLNFQVELLLDKLKQKGAIRRALFLYSRSPSHSKNMTISRGGLMQCEELIAYLRDESEFRDKLTPITIFMEYRLDYRTAADTTGLQPILNQFTPANISRQAHILLDCGEDNVCKPKLEVSVDSDQKKIYIGDDNPLTLIVKAQNQGEGAYEAELIVSIPLQADFIGVVRNNEALARLSCAFKTENQTRQVVCDLGNPMKAGTQLLAGLRFSVHQQSEMDTSVKFDLQIQSSNLFDKVSPVVSHKVDLAVLAAVEIRGVSSPDHVFLPIPNWEHKENPETEEDVGPVVQHIYELRNNGPSSFSKAMLHLQWPYKYNNNTLLYILHYDIDGPMNCTSDMEINPLRIKISSLQTTEKNDTVAGQGERDHLITKRDLALSEGDIHTLGCGVAQCLKIVCQVGRLDRGKSAILYVKSLLWTETFMNKENQNHSYSLKSSASFNVIEFPYKNLPIEDITNSTLVTTNVTWGIQPAPMPVPVWVIILAVLAGLLLLAVLVFVMYRMGFFKRVRPPQEEQEREQLQPHENGEGNSET

SEQ ID NO: 70731 - protein, 16 aa, Homo sapiens
ILKFVNLLMVVVSHGR

SEQ ID NO: 70732 - protein, 43 aa, Homo sapiens
IFTCGLVGALQGALLCSSAILKRNLYSDLKNLDSRIRAQKKKN

SEQ ID NO: 70733 - protein, 386 aa, Homo sapiens
VLALALLALALCVPGARGRALEWFSAVVNIEYVDPQTNLTVWSVSESGRFGDSSPKEGAHGLVGVPWAPGGDLEGCAPDTRFFVPEPGGRGAAPWVALVARGGCTFKDKVLVAARRNASAVVLYNEERYGNITLPMSHAGTGNIVVIMISYPKGREILELVQKGIPVTMTIGVGTRHVQEFISGQSVVFVAIAFITMMIISLAWLIFYYIQRFLYTGSQIGSQSHRKETKKVIGQLLLHTVKHGEKGIDVDAENCAVCIENFKVKDIIRILPCKHIFHRICIDPWLLDHRTCPMCKLDVIKALGYWGEPGDVQEMPAPESPPGRDPAANLSLALPDDDGSDDSSPPSASPAESEPQCDPSFKGDAGENTALLEAGRSDSRHGGPIS

SEQ ID NO: 70734 - protein, 110 aa, Homo sapiens
IFSLGLILFELLYPFSTQMERVRTLTDVRNLKFPPLFTQKYPCEYVMVQDMLSPSPMERPEAINIIENAVFEDLDFPGKTVLRQRSRSLSSSGTKHSRQSNNSHSPLPSN

SEQ ID NO: 70735 - protein, 473 aa, Homo sapiens
RVNHKVPHVALQALTLLGACVANCGKIFHLEVCSRDFATEVRAVIKNKAHPKVCEKLKSLMVEWSEEFQKDPQFSLISATIKSMKEEGITFPPAGSQTVSAAAKNGTSSNKNKEDEDIAKAIELSLQEQKQQHTETKSLYPSSEIQLNNKVARKVRALYDFEAVEDNELTFKHGEIIIVLDDSDANWWKGENHRGIGLFPSNFVTTNLNIETEAAAVDKLNVIDDDVEEIKKSEPEPVYIDEDKMDRALQVLQSIDPTDSKPDSQDLLDLEDICQQMGPMIDEKLEEIDRKHSELSELNVKVLEALELYNKLVNEAPVYSVYSKLHPPAHYPPASSGVPMQTYPVQSHGGNYMGQSIHQVTVAQSYSLGPDQIGPLRSLPPNVNSSVTAQPAQTSYLSTGQDTVSNPTYMNQNSNLQSATGTTAYTQQMGMSVDMSSYQNTTSNLPQLAGFPVTVPAHPVAQQHTNYHQQPLL

SEQ ID NO: 70736 - protein, 13 aa, Homo sapiens
IMFLNFVFFHSTV

SEQ ID NO: 70737 - protein, 14 aa, Homo sapiens
IFCKILKILSFFSG

SEQ ID NO: 70738 - protein, 336 aa, Homo sapiens
RCFCPVFLHSQMLWELVLLGEPLVVMAPSPSESSETVLALVNCISPLKYFSDFRPYFTIHDSEFKEYTTRTQAPPSVILGVTNPFFAKTLQHWPHIIRIGDLKPTGEIPKQVKVKKLKNLKTLDSKPGVYTSYKPYLNRDEEIIKQLQKGVQQKRPSEAQSVILRRYFLELTQSFIIPLERYVASLMPLQKSISPWKSPPQLRQFLPEEFMKTLEKTGPQLTSRIKGDWIGLYRHFLKSPNFDGWFKTRRKEMTQKLEALHLEALCEEDLLLWIQKHTEVETVDLVLKLKNKLLQADREHLPVKPDTMEKLRTHIDAIILALPEDLQGILLKTGMT

SEQ ID NO: 70739 - protein, 28 aa, Homo sapiens
LALALALALELRRSLGLSLAARSLDTFS

SEQ ID NO: 70740 - protein, 15 aa, Homo sapiens
KSPSGLLLFYFFFFN

SEQ ID NO: 70741 - protein, 680 aa, Homo sapiens
LLLLTVVFGFLYGAMLYYELQTQLRKAEAVALKYQQHQESLSAQLQVVYEHRSRLEKSLQKERLEHKKAKEDFLVYKLEAQETLNKGRQDSNSRYSALNVQHQMLKSQHEELKKQHSDLEEEHRKQGEDFSRTFNDHKQKYLQLQQEKEQELSKLKETVYNLREENRQLRKAHQDIHTQLQDVKQQHKNLLSEHEQLVVTLEDHKSALAAAQTQVAEYKQLKDTLNRIPSLRKPDPAEQQNVTQVAHSPQGYNTAREKPTREVQEVSRNNDVWQNHEAVPGRAEDTKLYAPTHKEAEFQAPPEPIQQEVERREPEEHQVEEEHRKALEEEEMEQVGQAEHLEEEHDPSPEEQDREWKEQHEQREAANLLEGHARAEVYPSAKPMIKFQSPYEEQLEQQRLAVQQVEEAQQLREHQEALHQQRLQGHLLRQQEQQQQQVAREMALQRQAELEEGRPQHQEQLRQQAHYDAMDNDIVQGAEDQGIQGEEGAYERDNQHQDEAEGDPGNRHEPREQGPREADPESEADRAAVEDINPADDPNNQGEDEFEEAEQVREENLPDENEEQKQSNQKQENTEVEEHLVMAGNPDQQEDNVDEQYQEEAEEEVQEDLTEEKKRELEHNAEETYGENDENTDDKNNDGEEQEVRDDNRPKGREEHYEEEEEEEEDGAAVAEKSHRRAEM

SEQ ID NO: 70742 - protein, 35 aa, Homo sapiens
KLFTVLLSSHVLFCFLNFPPRSVYTGLSKLLCCWN

SEQ ID NO: 70743 - protein, 16 aa, Homo sapiens
IPGYLWRLFSVASSLC

SEQ ID NO: 70744 - protein, 589 aa, Homo sapiens
RAPPPPPLLLLLALLPLLPAPGAAAAPAPRPPELQSASAGPSVSLYLSEDEVRRLIGLDAELYYVRNDLISHYALSFSLLVPSETNFLHFTWHAKSKVEYKLGFQVDNVLAMDMPQVNISVQGEVPRTLSVFRVELSCTGKVDSEVMILMQLNLTVNSSKNFTVLNFKRRKMCYKKLEEVKTSALDKNTSRTIYDPVHAAPTTSTRVFYISVGVCCAVIFLVAIILAVLHLHSMKRIELDDSISASSSSQGLSQPSTQTTQYLRADTPNNATPITSSLGYPTLRIEKNDLRSVTLLEAKGKVKDIAISRERITLKDVLQEGTFGRIFHGILIDEKDPNKEKQAFVKTVKDQASEIQVTMMLTESCKLRGLHHRNLLPITHVCIEEGEKPMVILPYMNWGNLKLFLRQCKLVEANNPQAISQQDLVHMAIQIACGMSYLARREVIHKDLAARNCVIDDTLQVKITDNALSRDLFPMDYHCLGDNENRPVRWMALESLVNNEFSSASDVWAFGVTLWELMTLGQTPYVDIDPFEMAAYLKDGYRIAQPINCPDELFAVMACCWALDPEERPKFQQLVQCLTEFHAALGAYV

SEQ ID NO: 70745 - protein, 43 aa, Homo sapiens
ITGFRLSLGILALLTLLGALGIANSFLDEYLDLNIAKKLRRQF

SEQ ID NO: 70746 - protein, 120 aa, Homo sapiens
LFSSGVFWMGLLFIPVASLLLDVVYKVIKRTAFKTLVDEVQELEAKSQDPGAVVLGKSLTERAQLLKNVFKKNHVNLYRSESLQQNLLHGYAFSQDENGIVSQSEVIRAYDTTKQRPDEW

SEQ ID NO: 70747 - protein, 231 aa, Homo sapiens
LLVPMLGLAAFRWIWSRESQKEVEKEREAYRRRTAAFQQDLEAKYHAMISENRRAVAQLSLELEKEQNRTASYREALISQGRKLVEEKKLLEQERAQVMQEKRQVQPLRSAYLSCLQREENWQRRARLLLKEFEAVLTERQNIYCSLFLPRSKRLEIEKSLLVRASVDPVAADLEMAAGLTDIFQHDTYCGDVWNTNKRQNGRLMWLYLKYWELVVELKKFKRVEEAILEK

SEQ ID NO: 70748 - protein, 36 aa, Homo sapiens
LAIFCSFIGAFLTFPGLRLAQMHLDALNLATEKITQ

SEQ ID NO: 70749 - protein, 940 aa, Homo sapiens
VFLPLKWSLATMSFLLSSLLALLTVSTPSWCQSTEASPKRSDGTPFPWNKIRLPEYVIPVHYDLLIHANLTTLTFWGTTKVEITASQPTSTIILHSHHLQISRATLRKGAGERLSEEPLQVLEHPRQEQIALLAPEPLLVGLPYTVVIHYAGNLSETFHGFYKSTYRTKEGELRILASTQFEPTAARMAFPCFDEPAFKASFSIKIRREPRHLAISNMPLVKSVTVAEGLIEDHFDVTVKMSTYLVAFIISDFESVSKITKSGVKVSVYAVPDKINQADYALDAAVTLLEFYEDYFSIPYPLPKQDLAAIPDFQSGAMENWGLTTYRESALLFDAEKSSASSKLGITMTVAHELAHQWFGNLVTMEWWNDLWLNEGFAKFMEFVSVSVTHPELKVGDYFFGKCFDAMEVDALNSSHPVSTPVENPAQIREMFDDVSYDKGACILNMLREYLSADAFKSGIVQYLQKHSYKNTKNEDLWDSMASICPTDGVKGMDGFCSRSQHSSSSSHWHQEGVDVKTMMNTWTLQKGFPLITITVRGRNVHMKQEHYMKGSDGAPDTGYLWHVPLTFITSKSDMVHRFLLKTKTDVLILPEEVEWIKFNVGMNGYYIVHYEDDGWDSLTGLLKGTHTAVSSNDRASLINNAFQLVSIGKLSIEKALDLSLYLKHETEIMPVFQGLNELIPMYKLMEKRDMNEVETQFKAFLIRLLRDLIDKQTWTDEGSVSERMLRSQLLLLACVHNYQPCVQRAEGYFRKWKESNGNLSLPVDVTLAVFAVGAQSTEGWDFLYSKYQFSLSSTEKSQIEFALCRTQNKEKLQWLLDESFKGDKIKTQEFPQILTLIGRNPVGYPLAWQFLRKNWNKLVQKFELGSSSIAHMVMGTTNQFSTRTRLEEVKGFFSSLKENGSQLRCVQQTIETIEENIGWMDKNFDKIRVWLQSEKLERM

SEQ ID NO: 70750 - protein, 947 aa, Homo sapiens
VFLPLKWSLATMSFLLSSLLALLTVSTPSWCQSTEASPKRSDGTPFPWNKIRLPEYVIPVHYDLLIHANLTTLTFWGTTKVEITASQPTSTIILHSHHLQISRATLRKGAGERLSEEPLQVLEHPRQEQIALLAPEPLLVGLPYTVVIHYAGNLSETFHGFYKSTYRTKEGELRILASTQFEPTAARMAFPCFDEPAFKASFSIKIRREPRHLAISNMPLVKSVTVAEGLIEDHFDVTVKMSTYLVAFIISDFESVSKITKSGVKVSVYAVPDKINQADYALDAAVTLLEFYEDYFSIPYPLPKQDLAAIPDFQSGAMENWGLTTYRESALLFDAEKSSASSKLGITMTVAHELAHQWFGNLVTMEWWNDLWLNEGFAKFMEFVSVSVTHPELKVGDYFFGKCFDAMEVDALNSSHPVSTPVENPAQIREMFDDVSYDKGACILNMLREYLSADAFKSGIVQYLQKHSYKNTKNEDLWDSMASICPTDGVKGMDGFCSRSQHSSSSSHWHQEGVDVKTMMNTWTLQKGFPLITITVRGRNVHMKQEHYMKGSDGAPDTGYLWHVPLTFITSKSDMVHRFLLKTKTDVLILPEEVEWIKFNVGMNGYYIVHYEDDGWDSLTGLLKGTHTAVSSNDRASLINNAFQLVSIGKLSIEKALDLSLYLKHETEIMPVFQGLNELIPMYKLMEKRDMNEVETQFKAFLIRLLRDLIDKQTWTDEGSVSERMLRSQLLLLACVHNYQPCVQRAEGYFRKWKESNGNLSLPVDVTLAVFAVGAQSTEGWDFLYSKYQFSLSSTEKSQIEFALCRTQNKEKLQWLLDESFKGDKIKTQEFPQILTLIGRNPVGYPLAWQFLRKNWNKLVQKFELGSSSIAHMVMGTTNQFSTRTRLEEVKGFFSSLKENGSQLRCVQQTIETIEENIGWMDKNFDKIRVWLQSEKLEHDPEADATG

SEQ ID NO: 70751 - protein, 31 aa, Homo sapiens
IASFGLLSALTLCYMIIRATASLNANEVEWF

SEQ ID NO: 70752 - protein, 360 aa, Homo sapiens
KMRSIRKRWTICTISLLLIFYKTKEIARTEEHQETQLIGDGELSLSRSLVNSSDKIIRKAGSSIFQHNVEGWKINSSLVLEIRKNILRFLDAERDVSVVKSSFKPGDVIHYVLDRRRTLNISHDLHSLLPEVSPMKNRRFKTCAVVGNSGILLDSECGKEIDSHNFVIRCNLAPVVEFAADVGTKSDFITMNPSVVQRAFGGFRNESDREKFVHRLSMLNDSVLWIPAFMVKGGEKHVEWVNALILKNKLKVRTAYPSLRLIHAVRGYWLTNKVPIKRPSTGLLMYTLATRFCDEIHLYGFWPFPKDLNGKAVKYHYYDDLKYRYFSNASPHRMPLEFKTLNVLHNRGALKLTTGKCVKQ

SEQ ID NO: 70753 - protein, 16 aa, Homo sapiens
IFMYCHFLFLVNWNIK

SEQ ID NO: 70754 - protein, 28 aa, Homo sapiens
MIFLTLSFTFFNQAWWSFKMLMNLRSGA

SEQ ID NO: 70755 - protein, 14 aa, Homo sapiens
KFLEYLFGAVSLMT

SEQ ID NO: 70756 - protein, 922 aa, Homo sapiens
ILCFVGGGLVVTLLFGKTNSEKYLEQCEHSFLPPTSPGVPKCLEEMKREARTIKIDRRLTGANIIDEPLQQVIQFSLRDYVQYWYYTLSDDESFLLEIRQTLQNALIQFATRSKEIDWQPYFTTRIVDDFGTHLRVFRKAQQKITEKDDQVKGTAEDLVDTFFEVEVEMEKEVCRDLVCTSPKDEEGFLRDLCEVLLYLLLPPGDFQNKIMRYFVREILARGILLPLINQLSDPDYINQYVIWMIRDSNCNYEAFMNIIKLSDNIGELEAVRDKAAEELQYLRSLDTAGDDINTIKNQINSLLFVKKVCDSRIQRLQSGKEINTVKLAANFGKLCTVPLDSILVDNVALQFFMDYMQQTGGQAHLFFWMTVEGYRVTAQQQLEVLLSRQRDGKHQTNQTKGLLRAAAVGIYEQYLSEKASPRVTVDDYLVAKLADTLNHEDPTPEIFDDIQRKVYELMLRDERFYPSFRQNALYVRMLAELDMLKDPSFRGSDDGDGESFNGSPTGSINLSLDDLSNVSSDDSVQLHAYISDTGVCNDHGKTYALYAITVHRRNLNSEEMWKTYRRYSDFHDFHMRITEQFESLSSILKLPGKKTFNNMDRDFLEKRKKDLNAYLQLLLAPEMMKASPALAHYVYDFLENKAYSKGKGDFARKMDTFVNPLRNSMRNVSNAVKSLPDSLAEGMTKMSDNMGKMSERLGQDIKQSFFKVPPLIPKTDSDPEHRRVSAQLDDNVDDNIPLRVMLLLMDEVFDLKERNQWLRRNIKNLLQQLIRATYGDTINRKIVDHVDWMTSPEQVADSVKRFRDAFWPNGILAEAVPCRDKSIRMRTRVAGKTKLLAIMPDELKHIIGAETTRKGILRVFEMFQHNQLNRRMVYVFLEGFLETLFPQYKFRELFNKLHSRSKQMQKYKQKLQTTQAPSLQKR

SEQ ID NO: 70757 - protein, 77 aa, Homo sapiens
IVILVSFGLFMYAKRNKRRIMRIFSVPPTEETLSEPNFYDTISKIRLRQQLEMYSISRKYDYQQPQNQADSVQLSLE

SEQ ID NO: 70758 - protein, 696 aa, Homo sapiens
LLGVWTSVAVVWFDLVDYEEVLGKLGIYDADGDGDFDVDDAKVLLGLKERSTSEPAVPPEEAEPHTEPEEQVPVEAEPQNIEDEAKEQIQSLLHEMVHAEHVEGEDLQQEDGPTGEPQQEDDEFLMATDVDDRFETLEPEVSHEETEHSYHVEETVSQDCNQDMEEMMSEQENPDSSEPVVEDERLHHDTDDVTYQVYEEQAVYEPLENEGIEITEVTAPPEDNPVEDSQVIVEEVSIFPVEEQQEVPPETNRKTDDPEQKAKVKKKKPKLLNKFDKTIKAELDAAEKLRKRGKIEEAVNAFKELVRKYPQSPRARYGKAQCEDDLAEKRRSNEVLRGAIETYQEVASLPDVPADLLKLSLKRRSDRQQFLGHMRGSLLTLQRLVQLFPNDTSLKNDLGVGYLLIGDNDNAKKVYEEVLSVTPNDGFAKVHYGFILKAQNKIAESIPYLKEGIESGDPGTDDGRFYFHLGDAMQRVGNKEAYKWYELGHKRGHFASVWQRSLYNVNGLKAQPWWTPKETGYTELVKSLERNWKLIRDEGLAVMDKAKGLFLPEDENLREKGDWSQFTLWQQGRRNENACKGAPKTCTLLEKFPETTGCRRGQIKYSIMHPGTHVWPHTGPTNCRLRMHLGLVIPKEGCKIRCANETKTWEEGKVLIFDDSFEHEVWQDASSFRLIFIVDVWHPELTPQQRRSLPAI

SEQ ID NO: 70759 - protein, 250 aa, Homo sapiens
VKACLWVFLWRFTIYSKNATVGQSVLNIKYKNDFSPNLRYQPPSKNQKIWYAVCTIGGRWLEERCYDLFRNHHLASFGKVKQCVNFVIGLLKLGGLINFLIFLQRGKFATLTERLLGIHSVFCKPQNICEVGFEYMNRELLWHGFAEFLIFLLPLINVQKLKAKLSSWCIPLTGAPNSDNTLATSGKECALCGEWPTMPHTIGCEHIFCYFCAKSSFLFDVYFTCPKCGTEVHSLQPLKSGIEMSEVNAL

SEQ ID NO: 70760 - protein, 222 aa, Homo sapiens
LPLTFLLLVLGSLLLYLAVSLMDPGYVNVQPQPQEELKEEQTAMVPPAIPLRRCRYCLVLQPLRARHCRECRRCVRRYDHHCPWMENCVGERNHPLFVVYLALQLVVLLWGLYLAWSGLRFFQPWGQWLRSSGLLFATFLLLSLFSLVASLLLVSHLYLVASNTTTWEFISSHRIAYLRQRPSNPFDRGLTRNLAHFFCGWPSGSWETLWAEEEEEGSSPAV

SEQ ID NO: 70761 - protein, 14 aa, Homo sapiens
IVLPRHEALLFLVF

SEQ ID NO: 70762 - protein, 99 aa, Homo sapiens
KALLVLLSLGCFFSVAETLHSMRYFDRAALFVEACLKYGAFEVTEDTEKLITAIYADYARSLKNLGFKQGAVLFASKAGAAGKDLLNELESPKEEPIEE

SEQ ID NO: 70763 - protein, 39 aa, Homo sapiens
VLFLLLWRLFLIIQTTGYQSIKRKFHFEELLVPKRISIS

SEQ ID NO: 70764 - protein, 11 aa, Homo sapiens
RPFLFFFSLSF

SEQ ID NO: 70765 - protein, 18 aa, Homo sapiens
VWFIHSGNMLILTVSHCF

SEQ ID NO: 70766 - protein, 30 aa, Homo sapiens
LFLLILLLFVAVLLYSLPNYLSMKIVKPNV

SEQ ID NO: 70767 - protein, 860 aa, Homo sapiens
IAFSLGSMGFLAYYVSTSPKAKEPLPLPLGDCSSGGAAGPGPARPPVPPRPPRPPETARTEPVVLVFVESAYSQLGQEIVAILESSRFRYSTELAPGRGDMPTLTDNTHGRYVLVIYENLLKYVNLDAWSRELLDRYCVEYGVGIIGFFRAHEHSLLSAQLKGFPLFLHSNLGLRDYQVNPSAPLLHLTRPSRLEPGPLPGDDWTIFQSNHSTYEPVLLASLRPAEPAVPGPVLRRARLPTVVQDLGLHDGIQRVLFGHGLSFWLHKLIFVDAVAYLTGKRLCLDLDRYILVDIDDIFVGKEGTRMKVADVEALLTTQNKLRTLVPNFTFNLGFSGKFYHTGTEEEDAGDDMLLKHRKEFWWFPHMWSHMQPHLFHNRSVLADQMRLNKQFALEHGIPTDLGYAVAPHHSGVYPIHTQLYEAWKSVWGIQVTSTEEYPHLRPARYRRGFIHNGIMVLPRQTCGLFTHTIFYNEYPGGSRELDRSIRGGELFLTVLLNPISIFMTHLSNYGNDRLGLYTFESLVRFLQCWTRLRLQTLPPVPLAQKYFELFPQERSPLWQNPCDDKRHKDIWSKEKTCDRLPKFLIVGPQKTGTTAIHFFLSLHPAVTSSFPSPSTFEEIQFFNSPNYHKGIDWYMDFFPVPSNASTDFLFEKSATYFDSEVVPRRGAALLPRAKIITVLTNPADRAYSWYQHQRAHGDPVALNYTFYQVISASSQTPLALRSLQNRCLVPGYYSTHLQRWLTYYPSGQLLIVDGQELRTNPAASMESIQKFLGITPFLNYTRTLRFDDDKGFWCQGLEGGKTRCLGRSKGRRYPDMDTESRLFLTDFFRNHNLELSKLLSRLGQPVPSWLREELQHSSLG

SEQ ID NO: 70768 - protein, 73 aa, Homo sapiens
VSSVIWVNLFLALILENFLHKWDPRSHLQPLAGTPEATYQMTVELLFRDILEEPGEDELTERLSQHPHLWLCR

SEQ ID NO: 70769 - protein, 31 aa, Homo sapiens
ICYSVLCLFSYVAAVHSSEEDLRTPPRPVSS

SEQ ID NO: 70770 - protein, 446 aa, Homo sapiens
TVYSKHWLFGVLSGLIQIVSPENTKSSSDDEEQLTELDEEMENEICRVWDMSMDEDVALFLQEFNAPDIFMGVLAKSKCPRLREICVGILGNMACFQEICVSISSDKNLGQVLLHCLYDSDPPTLLETSRLLLTCLSQAEVASVWVERIQEHPAIYDSICFIMSSSTNVDLLVKVGEVVDKLFDLDEKLMLEWVRNGAAQPLDQPQEESEEQPVFRLVPCILEAAKQVRSENPEWLDVYMHILQLLTTVDDGIQAIVHCPDTGKDIWNLLFDLVCHEFCQSDDPPIILQEQKTVLASVFSVLSAIYASQTEQEYLKIEKVDLPLIDSLIRVLQNMEQCQKKPENSAESNTEETKRTDLTQDDFHLKILKDILCEFLSNIFQALTKETVAQGVKEGQLSKQKCSSAFQNLLPFYSPVVEDFIKILREVDKALADDLEKNFPSLKVQT

SEQ ID NO: 70771 - protein, 484 aa, Homo sapiens
LGFAGVLFGWPSLVFVFKNEDYFKDLCGPDAGPIGNATGQAGRLGCMGDLFSTPDCKAQDERFSLIFTLGSFMNNFMTFPTGYIFDRFKTTVARLIAIFFYTTATLIIAFTSAGSAVLLFLAMPMLTIGGILFLITNLQIGNLFGQHRSTIITLYNGAFDSSSAVFLIIKLLYEKGISLRASFIFISVCSTWHVARTFLLMPRGHIPYPLPPNYSYGLCPGNGTTKEEKETAEHENRELQSKEFLSAKEETPGAGQKQELRSFWSYAFSRRFAWHLVWLSVIQLWHYLFIGTLNSLLTNMAGGDMARVSTYTNAFAFTQFGVLCAPWNGLLMDRLKQKYQKEARKTGSSTLAVALCSTVPSLALTSLLCLGFALCASVPILPLQYLTFILQVISRSFLYGSNAAFLTLAFPSEHFGKLFGLVMALSAVVSLLQFPIFTLIKGSLQNDPFYVNVMFMLAILLTFFHPFLVYRECRTWKESPSAIA

SEQ ID NO: 70772 - protein, 26 aa, Homo sapiens
IFLGGLFLVLIHYVLEPIYAKPLHSY

SEQ ID NO: 70773 - protein, 607 aa, Homo sapiens
LSSLLGLLLLGLLLPASLTGGVGSLNLEELSEMRYGIEILPLPVMGGQSQSSDVVIVSSKYKQRYECRLPAGAIHFQREREEETPAYQGPGIPELLSPMRDAPCLLKTKDWWTYEFCYGRHIQQYHMEDSEIKGEVLYLGYYQSAFDWDDETAKASKQHRLKRYHSQTYGNGSKCDLNGRPREAEVRFLCDEGAGISGDYIDRVDEPLSCSYVLTIRTPRLCPHPLLRPPPSAAPQAILCHPSLQPEEYMAYVQRQAVDSKQYGDKIIEELQDLGPQVWSETKSGVAPQKMAGASPTKDDSKDSDFWKMLNEPEDQAPGGEEVPAEEQDPSPEAADSASGAPNDFQNNVQVKVIRSPADLIRFIEELKGGTKKGKPNIGQEQPVDDAAEVPQREPEKERGDPERQREMEEEEDEDEDEDEDEDERQLLGEFEKELEGILLPSDRDRLRSEVKAGMERELENIIQETEKELDPDGLKKESERDRAMLALTSTLNKLIKRLEEKQSPELVKKHKKKRVVPKKPPPSPQPTGKIEIKIVRPWAEGTEEGARWLTDEDTRNLKEIFFNILVPGAEEAQKERQRQKELESNYRRVWGSPGGEGTGDLDEFDF

SEQ ID NO: 70774 - protein, 265 aa, Homo sapiens
IQLVVYIGSTLSYFGLAAVFIDFLIDTYSSNCCRSHIYPWCKCCQPCVVNEYYYRKKCESIVEPKPTLKYVSFVDESHIRMVNQQLLGRSLQDVKGQEVPRPAMDFTDLSRLPLALHDTPPIPGQPEEIQLLRKEATPRSRDSPVWCQCGSCLPSQLPESHRCLEELCCRKKPGACITTSELFRKLVLSRHVLQFLLLYQEPLLALDVDSTNSRLRHCAYRCYATWRFGSQDMADFAILPSCCRWRIRKEFPKSEGQYSGFKSPY

SEQ ID NO: 70775 - protein, 329 aa, Homo sapiens
LLSLGTCLGLAWFVFQQSEKFAKVENQYQLLKLETNEFQQLQSKISLISEKLESTESILQEATSSMSLMTQFEQEVSNLQDIMHDIQNNEEVLTQRMQSLNEKFQNITDFWKRSLEEMNINTDIFKSEAKHIHSQVTVQINSAEQEIKLLTERLKDLEDSTLRNIRTVKRQEEEDLLRVEEQLGSDTKAIEKLEEEQHALFARDEDLTNKLSDYEPKVEECKTHLPTIESAIHSVLRVSQDLIETEKKMEDLTMQMFNMEDDMLKAVSEIMEMQKTLEGIQYDNSILKMQNELDILKEKVHDFIAYSSTGEKGTLKEYNIENKGIGGDF

SEQ ID NO: 70776 - protein, 169 aa, Homo sapiens
VNFILRCGLLLVTLSLAIAKHKQSSFTKSCYPRGTLSQAVDALYIKAAWLKATIPEDRIKNIRLLKKKTKKQFMKNCQFQEQLLSFFMEDVFGQLQLQGCKKIRFVEDFHSLRQKLSHCISCASSAREMKSITRMKRIFYRIGNKGIYKAISELDILLSWIKKLLESSQ

SEQ ID NO: 70777 - protein, 31 aa, Homo sapiens
IRMMTMMMMMGFLDQPFLLDLKSRMILLQGP

SEQ ID NO: 70778 - protein, 31 aa, Homo sapiens
IAVSGICILLNVTELCYLLIRYCSGKSKKPV

SEQ ID NO: 70779 - protein, 56 aa, Homo sapiens
IFGYFILGTVVNKTLMGPIVMKLVHQEKLEGDFRFKHMQIRVNAEPAAFYSRHQHL

SEQ ID NO: 70780 - protein, 20 aa, Homo sapiens
LAASLWLGVLPTLTLGLLVH

SEQ ID NO: 70781 - protein, 226 aa, Homo sapiens
KAVVLLCASDLLLLLLLLPPPGSCAAEGSPGTPDESTPPPRKKKKDIRDYNDADMARLLEQWEKDDDIEEGDLPEHKRPSAPVDFSKIDPSKPESILKMTKKGKTLMMFVTVSGSPTEKETEEITSLWQGSLFNANYDVQRFIVGSDRAIFMLRDGSYAWEIKDFLVGQDRCADVTLEGQVYPGKGGGSKEKNKTKQDKGKKKKEGDLKSRSSKEENRAGNKREDL

SEQ ID NO: 70782 - protein, 29 aa, Homo sapiens
LTLRDNRLKLTFSPFQVLSLLLVLQPPPH

SEQ ID NO: 70783 - protein, 60 aa, Homo sapiens
ITTKISYEIGLMNFVLGFFCCFMGCDLGCCLIPCLINDFKDVTHTCPSCKAYIYTYKRLC

SEQ ID NO: 70784 - protein, 29 aa, Homo sapiens
KDSSQETLVNLAGLLVSLLMLPLVSGCPG

SEQ ID NO: 70785 - protein, 72 aa, Homo sapiens
VDCIPLFHGTLALAPMLEVALTLIDSWCKDHSYVIAGYYQANERVKDASPNQVAEKVASRIAEGFSDTALIM

SEQ ID NO: 70786 - protein, 32 aa, Homo sapiens
MVIFGFFGTISFFTVEWEAAAFVARGSDYRSI

SEQ ID NO: 70787 - protein, 22 aa, Homo sapiens
TLLAHLVVVITLFWSRCPSSCH

SEQ ID NO: 70788 - protein, 16 aa, Homo sapiens
IASLLYLLTHYLLPYA

SEQ ID NO: 70789 - protein, 752 aa, Homo sapiens
LCAFTLLDSVLVTLVQGPARWKMQLFEQPCPGEDPRPGGQIGEVELSSYTPPAGVPGKPAAPHFLPVLCSVSPSGSRVPHDLLGGSGGFTLEDALFGLLFGADATLLQSPVVLCGLPDGQLCCVILKALVTSRSAPGDPNALVKILHHLEEPVIFIGALKTEPQAAEAAENFLPDEDVHCDCLVAFGHHGRMLAIKASWDESGKLVPELREYCLPGPVLCAACGGGGRVYHSTPSDLCVVDLSRGSTPLGPEQPEEGPGGLPPMLCPASLNICSVVSLSASPRTHEGGTKLLALSAKGRLMTCSLDLDSEMPGPARMTTESAGQKIKELLSGIGNISERVSFLKKAVDQRNKALTSLNEAMNVSCALLSSGTGPRPISCTTSTTWSRLQTQDVLMATCVLENSSSFSLDQGWTLCIQVLTSSCALDLDSACSAITYTIPVDQLGPGARREVTLPLGPGENGGLDLPVTVSCTLFYSLREVVGGALAPSDSEDPFLDECPSDVLPEQEGVCLPLSRHTVDMLQCLRFPGLAPPHTRAPSPLGPTRDPVATFLETCREPGSQPAGPASLRAEYLPPSVASIKVSAELLRAALKDGHSGVPLCCATLQWLLAENAAVDVVRARALSSIQGVAPDGANVHLIVREVAMTDLCPAGPIQAVEIQVESSSLADICRAHHAVVGRMQTMVTEQATQGSSAPDLRVQYLRQIHANHETLLREVQTLRDRLCTEDEASSCATAQRLLQVYRQLRHPSLILL

SEQ ID NO: 70790 - protein, 137 aa, Homo sapiens
IVVLFGISITGGLFYTIFKELFSSSSPSKIYGRALEKCRSHPEVIGVFGESVKGYGEVTRRGRRQHVRFTEYVKDGLKHTCVKFYIEGSEPGKQGTVYAQVKENPGSGEYDFRYIFVEIESYPRRTIIIEDNRSQDD

SEQ ID NO: 70791 - protein, 202 aa, Homo sapiens
LQLSRASMAAWKSWTALRLCATVVVLDMVVCKGFVEDLDESFKENRNDDIWLVDFYAPWCGHCKKLEPIWNEVGLEMKSIGSPVKVGKMDATSYSSIASEFGVRGYPTIKLLKGDLAYNYRGPRTKDDIIEFAHRVSGALIRPLPSQQMFEHMQKRHRVFFVYVGGESPLKEKYIDAASELIVYTYFFSASEEVVPEVIFKI

SEQ ID NO: 70792 - protein, 35 aa, Homo sapiens
VRTAMTNRAGLLALMLHQTIQHDPLTTDLRSSADR

SEQ ID NO: 70793 - protein, 106 aa, Homo sapiens
KVLVDQLVASPLLGVWYFLGLGCLEGQTVGESCQELREKFWEFYKADWCVWPAAQFVNFLFVPPQFRVTYINGLTLGWDTYLSYLKYRSPVPLTPPGCVALDTRAD

SEQ ID NO: 70794 - protein, 610 aa, Homo sapiens
LFRIFIIWAISSWFRRGPAPQDQAGPGGAPRVASRNLFPKDTLMNLHVYISEHEHFTDFNATSALFWEQHDLVYGDWTSGENSDGCYEHFAELDIPQSVQQNGSIYIHVYFTKSGFHPDPRQKALYRRLATVHMSRMINKYKRRRFQKTKNLLTGETEADPEMIKRAEDYGPVEVISHWHPNITINIVDDHTPWVKGSVPPPLDQYVKFDAVSGDYYPIIYFNDYWNLQKDYYPINESLASLPLRVSFCPLSLWRWQLYAAQSTKSPWNFLGDELYEQSDEEQDSVKVALLETNPYLLALTIIVSIVHSVFEFLAFKNDIQFWNSRQSLEGLSVRSVFFGVFQSFVVLLYILDNETNFVVQVSVFIGVLIDLWKITKVMDVRLDREHRVAGIFPRLSFKDKSTYIESSTKVYDDMAFRYLSWILFPLLGCYAVYSLLYLEHKGWYSWVLSMLYGFLLTFGFITMTPQLFINYKLKSVAHLPWRMLTYKALNTFIDDLFAFVIKMPVMYRIGCLRDDVVFFIYLYQRWIYRVDPTRVNEFGMSGEDPTAAAPVAEVPTAAGALTPTPAPTTTTATREEASTSLPTKPTQGASSASEPQEAPPKPAEDKKKD

SEQ ID NO: 70795 - protein, 54 aa, Homo sapiens
LSVVVLLHALLAMGCKLYFFQSLPPENVAPPPQITSLPSNIALSPTLPQSLAPS

SEQ ID NO: 70796 - protein, 187 aa, Homo sapiens
LLLTLAVIAILLFILLWHLCWPKEKADPYPYPGLVCGVPNTHTPSSSHLSSPGALETGDTWKEASLLPLLSRELSSLASQPLSRLLDELEVLEELIVLLDPEPGPGGGMAHGTTRHLAARYGLPAAWSTFAYSLRPSRSPLRALIEMVVAREPSASLGQLGTHLAQLGRADALRVLSKLGSSGVCWA

SEQ ID NO: 70797 - protein, 50 aa, Homo sapiens
VWGLVLWLFEYHRSTLQPSLQSSMTYLYEDSNVWHDISDFLVYNKSRPSN

SEQ ID NO: 70798 - protein, 21 aa, Homo sapiens
VLVVLGVVLLGQFVVRRFFKS

SEQ ID NO: 70799 - protein, 13 aa, Homo sapiens
LTFLLGFSVIVSP

SEQ ID NO: 70800 - protein, 201 aa, Homo sapiens
KVLAAGVVPLLLVLHWKHGAGSPLPITPVNATCAIRHPCHNNLMNQIRSQLAQLNGSANALFILYYTAQGEPFPNNLDKLCGPNVTDFPPFHANGTEKAKLVELYRIVVYLGTSLGNITRDQKILNPSALSLHSKLNATADILRGLLSNVLCRLCSKYHVGHVDVTYGPDTSGKDVFQKKKLGCQLLGKYKQIIAVLAQAF

SEQ ID NO: 70801 - protein, 249 aa, Homo sapiens
LPLLLFLLPAGAVQGWETEERPRTREEECHFYAGGQVYPGEASRVSVADHSLHLSKAKISKPAPYWEGTAVIDGEFKELKLTDYRGKYLVFFFYPLDFTFVCPTEIIAFGDRLEEFRSINTEVVACSVDSQFTHLAWINTPRRQGGLGPIRIPLLSDLTHQISKDYGVYLEDSGHTLRGLFIIDDKGILRQITLNDLPVGRSVDETLRLVQAFQYTDKHGEVCPAGWKPGSETIIPDPAGKLKYFDKLN

SEQ ID NO: 70802 - protein, 522 aa, Homo sapiens
LFLLRALGFLIGLVGRAALVLGGPKFASKTPRPVTEPLLLLSGMQLAKLIRQRKVKCIDVVQAYINRIKDVNPMINGIVKYRFEEAMKEAHAVDQKLAEKQEDEATLENKWPFLGVPLTVKEAFQLQGMPNSSGLMNRRDAIAKTDATVVALLKGAGAIPLGITNCSELCMWYESSNKIYGRSNNPYDLQHIVGGSSGGEGCTLAAACSVIGVGSDIGGSIRMPAFFNGIFGHKPSPGVVPNKGQFPLAVGAQELFLCTGPMCRYAEDLAPMLKVMAGPGIKRLKLDTKVHLKDLKFYWMEHDGGSFLMSKVDQDLIMTQKKVVVHLETILGASVQHVKLKKMKYSFQLWIAMMSAKGHDGKEPVKFVDLLGDHGKHVSPLWELIKWCLGLSVYTIPSIGLALLEEKLRYSNEKYQKFKAVEESLRKELVDMLGDDGVFLYPSHPTVAPKHHVPLTRPFNFAYTGVFSALGLPVTQCPLGLNAKGLPLGIQVVAGPFNDHLTLAVAQYLEKTFGGWVCPGKF

SEQ ID NO: 70803 - protein, 89 aa, Homo sapiens
KALPVNVKWLLCGCLCCCCTLGCSLWPVICLNKRTRRSIQKLIEWENNRLYHKLALHWKLTKRKCETSNMMEYVILIEFLPKYPIFRPD

SEQ ID NO: 70804 - protein, 1101 aa, Homo sapiens
VDATSLFLLFLAQMTASGLRIIFTLDEVAFIQNLVFYIEAAYKVADYGMWERGDKTNQGIPELNASSVGMAKAALEAIDELDLFGAHGGRKSVIHVLPDEVEHCQSILFSMLPRASTSKEIDAGLLSIISFPAFAVEDVNLVNVTKNEIISKLQGRYGCCRFLRDGYKTPREDPNRLHYDPAELKLFENIECEWPVFWTYFIIDGVFSGDAVQVQEYREALEGILIRGKNGIRLVPELYAVPPNKVDEEYKNPHTVDRVPMGKVPHLWGQSLYILSSLLAEGFLAAGEIDPLNRRFSTSVKPDVVVQVTVLAENNHIKDLLRKHGVNVQSIADIHPIQVQPGRILSHIYAKLGRNKNMNLSGRPYRHIGVLGTSKLYVIRNQIFTFTPQFTDQHHFYLALDNEMIVEMLRIELAYLCTCWRMTGRPTLTFPISRTMLTNDGSDIHSAVLSTIRKLEDGYFGGARVKLGNLSEFLTTSFYTYLTFLDPDCDEKLFDNASEGTFSPDSDSDLVGYLEDTCNQESQDELDHYINHLLQSTSLRSYLPPLCKNTEDRHVFSAIHSTRDILSVMAKAKGLEVPFVPMTLPTKVLSAHRKSLNLVDSPQPLLEKVPESDFQWPRDDHGDVDCEKLVEQLKDCSNLQDQADILYILYVIKGPSWDTNLSGQHGVTVQNLLGELYGKAGLNQEWGLIRYISGLLRKKVEVLAEACTDLLSHQKQLTVGLPPEPREKIISAPLPPEELTKLIYEASGQDISIAVLTQEIVVYLAMYVRAQPSLFVEMLRLRIGLIIQVMATELARSLNCSGEEASESLMNLSPFDMKNLLHHILSGKEFGVERSVRPIHSSTSSPTISIHEVGHTGVTKTERSGINRLRSEMKQMTRRFSADEQFFSVGQAASSSAHSSKSARSSTPSSPTGTSSSDSGGHHIGWGERQGQWLRRRRLDGAINRVPVGFYQRVWKILQKCHGLSIDGYVLPSSTTREMTPHEIKFAVHVESVLNRVPQPEYRQLLVEAIMVLTLLSDTEMTSIGGIIHVDQIVQMASQLFLQDQVSIGAMDTLEKDQATGICHFFYDSAPSGAYGTMTYLTRAVASYLQELLPNSGCQMQ

SEQ ID NO: 70805 - protein, 309 aa, Homo sapiens
KGVMLGSIFCALITMLGHIRIGHGNRMHHHEHHHLQAPNKEDILKISEDERMELSKSFRVYCIILVKPKDVSLWAAVKETWTKHCDKAEFFSSENVKVFESINMDTNDMWLMMRKAYKYAFDKYRDQYNWFFLARPTTFAIIENLKYFLLKKDPSQPFYLGHTIKSGDLEYVGMEGGIVLSVESMKRLNSLLNIPEKCPEQGGMIWKISEDKQLAVCLKYAGVFAENAEDADGKDVFNTKSVGLSIKEAMTYHPNQVVEGCCSDMAVTFNGLTPNQMHVMMYGVYRLRAFGHIFNDALVFLPPNGSDND

SEQ ID NO: 70806 - protein, 147 aa, Homo sapiens
MTLGMIWTIILRFAIQDISVEETSAKEGLLLWCQRKTAPYKNVNIQNFHISWKDGLGFCALIHRHRPELIDYGKLRKDDPLTNLNTAFDVAEKYLDIPKMLDAEDIVGTARPDEKAIMTYVSSFYHAFSGAQKMCRHAKAGWEGRVT

SEQ ID NO: 70807 - protein, 240 aa, Homo sapiens
MLLPSKDFWYSVVNGVIFNCLAVLALSSHLRTMLTDPGAVPKGNATKEYMESLQLKPGEVIYKCPKCCCIKPERAHHCSICKRCIRKMDHHCPWVNNCVGEKNQRFFVLFTMYIALSSVHALILCGFQFISCVRGQWTECSDFSPPITVILLIFLCLEGLLFFTFTAVMFGTQIHSICNDETEIERLKSEKPTWERRLRWEGMKSVFGGPPSLLWMNPFVGFRFRRLPTRPRKGGPEFSV

SEQ ID NO: 70808 - protein, 495 aa, Homo sapiens [sequence omitted]

SEQ ID NO: 70809 - protein, 225 aa, Homo sapiens
MVPSVLWPRACWTLLVCCLLTPGVQGQEFLLRVEPQNPVLSAGGSLFVNCSTDCPSSEKIALETSLSKELVASGMGWAAFNLSNVTGNSRILCSVYCNGSQITGSSNITVYRLPERVELAPLPPWQPVGQNFTLRCQVEDGSPRTSLTVVLLRWEEELSRQPAVEEPAEVTATVLASRDDHGAPFSCRTELDMQPQGLGLFVNTSAPRQLRTFGERRGFRRWVTS

SEQ ID NO: 70810 - protein, 82 aa, Homo sapiens
MAQKPFLWQRWGFGRLTMLLHSLRVLAQSRAVVYLTSNGRCVCVCVVGEWGGVLFLQCCLPGSCSSHTYLWVAGEEDQVRMQ

SEQ ID NO: 70811 - protein, 37 aa, Homo sapiens
LQALLRCFTWLRLCQISMFLSLKCLNTRSSHLGAHCR

SEQ ID NO: 70812 - protein, 19 aa, Homo sapiens
KPKDTIFWIWVAFLHAPIV

SEQ ID NO: 70813 - protein, 43 aa, Homo sapiens
IYGACVVFTLGMFSAGLSDLRHMRMTRSVDNVQFLPFLTTEVK

SEQ ID NO: 70814 - protein, 853 aa, Homo sapiens
IKMTSHYVIAIFALMSSCLATAGPEPGALCELSPVSASHPVQALMESFTVLSGCASRGTTGLPQEVHVLNLRTAGQGPGQLQREVTLHLNPISSVHIHHKSVVFLLNSPHPLVWHLKTERLATGVSRLFLVSEGSVVQFSSANFSLTAETEERNFPHGNEHLLNWARKEYGAVTSFTELKIARNIYIKVGEDQVFPPKCNIGKNFLSLNYLAEYLQPKAAEGCVMSSQPQNEEVHIIELITPNSNPYSAFQVDITIDIRPSQEDLEVVKNLILILKCKKSVNWVIKSFDVKGSLKIIAPNSIGFGKESERSMTMTKSIRDDIPSTQGNLVKWALDNGYSPITSYTMAPVANRFHLRLENNAEEMGDEEVHTIPPELRILLDPGALPALQNPPIRGGEGQNGGLPFPFPDISRRVWNEEGEDGLPRPKDPVIPSIQLFPGLREPEEVQGSVDIALSVKCDNEKMIVAVEKDSFQASGYSGMDVTLLDPTCKAKMNGTHFVLESPLNGCGTRPRWSALDGVVYYNSIVIQVPALGDSSGWPDGYEDLESGDNGFPGDMDEGDASLFTRPEIVVFNCSLQQVRNPSSFQEQPHGNITFNMELYNTDLFLVPSQGVFSVPENGHVYVEVSVTKAEQELGFAIQTCFISPYSNPDRMSHYTIIENICPKDESVKFYSPKRVHFPIPQADMDKKRFSFVFKPVFNTSLLFLQCELTLCTKMEKHPQKLPKCVPPDEACTSLDASIIWAMMQNKKTFTKPLAVIHHEAESKEKGPSMKEPNPISPPIFHGLDTLTVMGIAFAAFVIGALLTGALWYIYSHTGETAGRQQVPTSPPASENSSAAHSIGSTQSTPCSSSSTA

SEQ ID NO: 70815 - protein, 36 aa, Homo sapiens
RPGLPQGRHLCWLLCAFTLKLCQAEAPVQEEKLSGG

SEQ ID NO: 70816 - protein, 427 aa, Homo sapiens
ITGVFSMRLWTPVGVLTSLAYCLHQRRVALAELQEADGQCPVDRSLLKLKMVQVVFRHGARSPLKPLPLEEQVEWNPQLLEVPPQTQFDYTVTNLAGGPKPYSPYDSQYHETTLKGGMFAGQLTKVGMQQMFALGERLRKNYVEDIPFLSPTFNPQEVFIRSTNIFRNLESTRCLLAGLFQCQKEGPIIIHTDEADSEVLYPNYQSCWSLRQRTRGRRQTASLQPGISEDLKKVKDRMGIDSSDKVDFFILLDNVAAEQAHNLPSCPMLKRFARMIEQRAVDTSLYILPKEDRESLQMAVGPFLHILESNLLKAMDSATAPDKIRKLYLYAAHDVTFIPLLMTLGIFDHKWPPFAVDLTMELYQHLESKEWFVQLYYHGKEQVPRGCPDGLCPLDMFLNAMSVYTLSPEKYHALCSQTQVMEVGNEE

SEQ ID NO: 70817 - protein, 114 aa, Homo sapiens
LKVWLGIMLPVLGIKSLSPFAITYLDRLLLMHPNLTKGFGMIGPKDFFPLLDFAYMPNNSLTPSLQEQLCQLYPRLKVLAFGAKPDSTLHTYFPSFLSRATPSCPPEMKKESPF

SEQ ID NO: 70818 - protein, 451 aa, Homo sapiens
LGWMLGNLWNTGLFCLFLVFELLRQNMQHEPAFDSSSEEEEEEVRVVPVTSYNWLTDFPSQEALDSFYKHYVQNAIRDLPCTCEFVESFVDDLIEACRVLSRQEAHPQLEDCLGIGAAFEKWGTLHETQKFDILVPIVPPQGTMFVLEMRDPALGRRCGCVLVESECVCKREKLLGDVLCLVHHHRDPSAVLGKCSSSIKAALCTGFHLDVCKTVQWFRNMMGNAWALVAHKYDFKLSLPPSTTSCKLRLDYRSGRFLSIHLVLGVQREDTLVYLVSQAPDQEQLTSVDWPESFVACEHLFLKLVGRFAPENTCHLKCLQIILSLRQHQSLPHGASRPILTSYHFKTALMHLLLRLPLTDWAHNMLSQRLQDILWFLGRGLQQRSLHHFLIGNNFLPLTIPIPKTFRNAEPVNLFQHLVLNPKAHSQAVEEFQNLLTQVKTLPHAPLAAAP

SEQ ID NO: 70819 - protein, 341 aa, Homo sapiens
LAFCIFMVRLIFERFVAKPCAIALNIQANGPQIAPPNAILEKVFTAITKHPDEKRLEGLSKQLDWDVRSIQRWFRQRRNQEKPSTLTRFCESMWRFSFYLYVFTYGVRFLKKTPWLWNTRHCWYNYPYQPLTTDLHYYYILELSFYWSLMFSQFTDIKRKDFGIMFLHHLVSIFLITFSYVNNMARVGTLVLCLHDSADALLEAAKMANYAKFQKMCDLLFVMFAVVFITTRLGIFPLWVLNTTLFESWEIVGPYPSWWVFNLLLLLVQGLNCFWSYLIVKIACKAVSRGKVSKDDRSDIESSSDEEDSEPPGKNPHTATTTNGTSGTNGYLLTGSCSMDD

SEQ ID NO: 70820 - protein, 15 aa, Homo sapiens
MRDWIWLLCHVFILN

SEQ ID NO: 70821 - protein, 328 aa, Homo sapiens
KVLFTLLYTQALAALSVKCSEEDRSAWKHAGALKKSTCDAEKSYEVLLSFVISELFKGKLYHEEGTQECAMVNPIAWSPESMEKCLQDFCLPFLRITSLLQHHLFGEDLPSCQEEEEFSVLASCLGLLPTFYQTEHPFISASCLDWPVPAFDIITQWCFEIKSFTERHAEQGKALLIQESKWKLPHLLQLPENYNTIFQYYHRKTCSVCTKVPKDPAVCLVCGTFVCLKGLCCKQQSYCECVLHSQNCGAGTGIFLLINASVIIIIRGHRFCLWGSVYLDAHGEEDRDLRRGKPLYICKERYKVLEQQWISHTFDHINKRWGPHYNGL

SEQ ID NO: 70822 - protein, 416 aa, Homo sapiens
KGLVPAMLWGLSLFLNLPGPIWLQPSPPPQSSPPPQPHPCHTCRGLVDSFNKGLERTIRDNFGGGNTAWEEENLSKYKDSETRLVEVLEGVCSKSDFECHRLLELSEELVESWWFHKQQEAPDLFQWLCSDSLKLCCPAGTFGPSCLPCPGGTERPCGGYGQCEGEGTRGGSGHCDCQAGYGGEACGQCGLGYFEAERNASHLVCSACFGPCARCSGPEESNCLQCKKGWALHHLKCVDIDECGTEGANCGADQFCVNTEGSYECRDCAKACLGCMGAGPGRCKKCSPGYQQVGSKCLDVDECETEVCPGENKQCENTEGGYRCICAEGYKQMEGICVKEQIPGAFPILTDLTPETTRRWKLGSHPHSTYVKMKMQRDEATFPGLYGKQVAKLGSQSRQSDRGTRLIHSQQASSQR

SEQ ID NO: 70823 - protein, 24 aa, Homo sapiens
IIFLIYLQGSVCQMCATLLISHQR

SEQ ID NO: 70824 - protein, 1608 aa, Homo sapiens
RTMIAEPAHFYLFGLICLCSGSRLRQEDFPPRIVEHPSDLIVSKGEPATLNCKAEGRPTPTIEWYKGGERVETDKDDPRSHRMLLPSGSLFFLRIVHGRKSRPDEGVYVCVARNYLGEAVSHNASLEVAILRDDFRQNPSDVMVAVGEPAVMECQPPRGHPEPTISWKKDGSPLDDKDERITIRGGKLMITYTRKSDAGKYVCVGTNMVGERESEVAELTVLERPSFVKRPSNLAVTVDDSAEFKCEARGDPVPTVRWRKDDGELPKSRYEIRDDHTLKIRKVTAGDMGSYTCVAENMVGKAEASATLTVQAPSEPPHFVVKPRDQVVALGRTVTFQCEATGNPQPAIFWRREGSQNLLFSYQPPQSSSRFSVSQTGDLTITNVQRSDVGYYICQTLNVAGSIITKAYLEVTDVIADRPPPVIRQGPVNQTVAVDGTFVLSCVATGSPVPTILWRKDGVLVSTQDSRIKQLENGVLQIRYAKLGDTGRYTCIASTPSGEATWSAYIEVQEFGVPVQPPRPTDPNLIPSAPSKPEVTDVSRNTVTLSWQPNLNSGATPTSYIIEAFSHASGSSWQTVAENVKTETSAIKGLKPNAIYLFLVRAANAYGISDPSQISDPVKTQDVLPTSQGVDHKQVQRELGNAVLHLHNPTVLSSSSIEVHWTVDQQSQYIQGYKILYRPSGANHGESDWLVFEVRTPAKNSVVIPDLRKGVNYEIKARPFFNEFQGADSEIKFAKTLEEAPSAPPQGVTVSKNDGNGTAILVSWQPPPEDTQNGMVQEYKVWCLGNETRYHINKTVDGSTFSVVIPFLVPGIRYSVEVAASTGAGSGVKSEPQFIQLDAHGNPVSPEDQVSLAQQISDVVKQPAFIAGIGAACWIILMVFSIWLYRHRKKRNGLTSTYAGIRKVTYQRGGEAVSSGGRPGLLNISEPAAQPWLADTWPNTGNNHNDCSISCCTAGNGNSDSNLTTYSRPADCIANYNNQLDNKQTNLMLPESTVYGDVDLSNKINEMKTFNSPNLKDGRFVNPSGQPTPYATTQLIQSNLSNNMNNGSGDSGEKHWKPLGQQKQEVAPVQYNIVEQNKLNKDYRANDTVPPTIPYNQSYDQNTGGSYNSSDRGSSTSGSQGHKKGARTPKVPKQGGMNWADLLPPPPAHPPPHSNSEEYNISVDESYDQEMPCPVPPARMYLQQDELEEEEDERGPTPPVRGAASSPAAVSYSHQSTATLTPSPQEELQPMLQDCPEETGHMQHQPDRRRQPVSPPPPPRPISPPHTYGYISGPLVSDMDTDAPEEEEDEADMEVAKMQTRRLLLRGLEQTPASSVGDLESSVTGSMINGWGSASEEDNISSGRSSVSSSDGSFFTDADFAQAVAAAAEYAGLKVARRQMQDAAGRRHFHASQCPRPTSPVSTDSNMSAAVMQKTRPAKKLKHQPGHLRRETYTDDLPPPPVPPPAIKSPTAQSKTQLEVRPVVVPKLPSMDARTDRSSDRKGSSYKGREVLDGRQVVDMRTNPGDPREAQEQQNDGKGRGNKAAKRDLPPAKTHLIQEDILPYCRPTFPTSNNPRDPSSSSSMSSRGSGSRQREQANVGRRNIAEMQVLGGYERGEDNNEELEETES

SEQ ID NO: 70825 - protein, 15 aa, Homo sapiens
VAKWLLTIFFLRNLV

SEQ ID NO: 70826 - protein, 285 aa, Homo sapiens
IFILAFAIILLNTDMYSPNVKPERKMKLEDFIKNLRGVDDGEDIPREMLMGIYERIRKRELKTNEDHVSQVQKVEKLIVGKKPIGSLHPGLGCVLSLPHRRLVCYCRLFEVPDPNKPQKLGLHQREIFLFNDLLVVTKIFQKKKNSVTYSFRQSFSLYGMQVLLFENQYYPNGIRLTSSVPGADIKVLINFNAPNPQDRKKFTDDLRESIAEVQEMEKHRIESELEKQKGVVRPSMSQCSSLKKESGNGTLSRACLDDSYASGEGLKRSALSSSLRDLSEAGVHH

SEQ ID NO: 70827 - protein, 336 aa, Homo sapiens
LLILTIFLVAEAEGAAQPNNSLMLQTSKENHALASSSLCMDEKQITQNYSKVLAEVNTSWPVKMATNAVLCCPPIALRNLIIITWEIILRGQPSCTKAYKKETNETKETNCTDERITWVSRPDQNSDLQIRTVAITHDGYYRCIMVTPDGNFHRGYHLQVLVTPEVTLFQNRNRTAVCKAVAGKPAAHISWIPEGDCATKQEYWSNGTVTVKSTCHWEVHNVSTVTCHVSHLTGNKSLYIELLPVPGAKKSAKLYIPYIILTIIILTIVGFIWLLKVNGCRKYKLNKTESTPVVEEDEMQPYASYTEKNNPLYDTTNKVKASEALQSEVDTDLHTL

SEQ ID NO: 70828 - protein, 14 aa, Homo sapiens
VAELQFCGFMLVTL

SEQ ID NO: 70829 - protein, 30 aa, Homo sapiens
LHICHAVILLQLWLGPQPFPKSTQHSKKAH

SEQ ID NO: 70830 - protein, 267 aa, Homo sapiens
ILVVVLAVVVPRWRQQWSGPGTTKRFPETVLARCVKYTEIHPEMRHVDCQSVWDAFKGAFISKHPCNITEEDYQPLMKLGTQTVPCNKILLWSRIKDLAHQFTQVQRDMFTLEDTLLGYLADDLTWCGEFNTSKINYQSCPDWRKDCSNNPVSVFWKTVSRRFAEAACDVVHVMLNGSRSKIFDKNSTFGSVEVHNLQPEKVQTLEAWVIHGGREDSRDLCQDPTIKELESIISKRNIQFSCKNIYRPDKFLQCVKNPEDSSCTSEI

SEQ ID NO: 70831 - protein, 79 aa, Homo sapiens
LWISGILAILRVLISQSTEDIVLSRIQELSFSPYLISCTVINRLRDGDSTSTLEEHSEGKQIKNLPEETFSRYAFYLSL

SEQ ID NO: 70832 - protein, 11 aa, Homo sapiens
LLLIIFSLKLG

SEQ ID NO: 70833 - protein, 168 aa, Homo sapiens
LNVALVALVLLGAYRLWVRWGRRGLGAGAGAGEESPATSLPRMKKRDFSLEQLRQYDGSRNPRILLAVNGKVFDVTKGSKFYGPAGPYGIFAGRDASRGLATFCLDKDALRDEYDDLSDLNAVQMESVREWEMQFKEKYDYVGRLLKPGEEPSEYTDEEDTKDHNKQD

SEQ ID NO: 70834 - protein, 345 aa, Homo sapiens
LLLLLLAGAGLSAASPPAAPRFNVSLDSVPELRWLPVLRHYDLDLVRAAMAQVIGDRVPKWVHVLIGKVVLELERFLPQPFTGEIRGMCDFMNLSLADCLLVNLAYESSVFCTSIVAQDSRGHIYHGRNLDYPFGNVLRKLTVDVQFLKNGQIAFTGTTFIGYVGLWTGQSPHKFTVSGDERDKGWWWENAIAALFRRHIPVSWLIRATLSESENFEAAVGKLAKTPLIADVYYIVGGTSPREGVVITRNRDGPADIWPLDPLNGAWFRVETNYDHWKPAPKEDDRRTSAIKALNATGQANLSLEALFQILSVVPVYNNFTIYTTVMSAGSPDKYMTRIRNPSRK

SEQ ID NO: 70835 - protein, 31 aa, Homo sapiens
KFHGSLFLPLLKVLGIFDFSSFMSQWDTFSE

SEQ ID NO: 70836 - protein, 46 aa, Homo sapiens
KTLKDRHFWQSCSLLAQLSFLCLDPLGPSWPWWVKTLICPVTCSRP

SEQ ID NO: 70837 - protein, 15 aa, Homo sapiens
VASTLLLWLSTQTTS

SEQ ID NO: 70838 - protein, 9 aa, Homo sapiens
VAQSLLLLL

SEQ ID NO: 70839 - protein, 6 aa, Homo sapiens
IILLMI

SEQ ID NO: 70840 - protein, 9 aa, Homo sapiens
IELFIIFLI

SEQ ID NO: 70841 - protein, 357 aa, Homo sapiens
LNFLTFLCGSAIGFLLCSQLFSILLGEKVDTQPNVLHNDPHARHSDDNGQNHLEGQMNFNADSSQHKDENTDIAENLYQKVRILCWVMTGPQNLEKKAKHVKATWAQRCNKVLFMSSEENKDFPAVGLKTKEGRDQLYWKTIKAFQYVHEHYLEDADWFLKADDDTYVILDNLRWLLSKYDPEEPIYFGRRFKPYVKQGYMSGGAGYVLSKEALKRFVDAFKTDKCTHSSSIEDLALGRCMEIMNVEAGDSRDTIGKETFHPFVPEHHLIKGYLPRTFWYWNYNYYPPVEGPGCCSDLAVSFHYVDSTTMYELEYLVYHLRPYGYLYRYQPTLPERILKEISQANKNEDTKVKLGNP

SEQ ID NO: 70842 - protein, 34 aa, Homo sapiens
LGTLFVFIGTLMYTEVWNNLGTTKSEPQKDSKKN

SEQ ID NO: 70843 - protein, 6 aa, Homo sapiens
MLLLIL

SEQ ID NO: 70844 - protein, 227 aa, Homo sapiens
IWGAGLSWGLYFFFYNAIKSYKTEGRAERLEATEYLVSAAEAGAMTLCITNPLWVTKTRLMLQYDAVVNSPHRQYKGMFDTLVKIYKYEGVRGLYKGFVPGLFGTSHGALQFMAYELLKLKYNQHINRLPEAQLSTVEYISVAALSKIFAVAATYPYQVVRARLQDQHMFYSGVIDVITKTWRKEGVGGFYKGIAPNLIRVTPACCITFVVYENVSHFLLDLREKRK

SEQ ID NO: 70845 - protein, 29 aa, Homo sapiens
ILALLLAFYAFFYLRLTTDVDPDLDQDED

SEQ ID NO: 70846 - protein, 22 aa, Homo sapiens
KPFLLGTVFFTCFPIPLMRISP

SEQ ID NO: 70847 - protein, 124 aa, Homo sapiens
LTTATLALCLVFTVATIMVLVVQRTDSIPNSPDNVPLKGGNCSEDLLCILKRAPFKKSWAYLQVAKHLNKTKLSWNKDGILHGVRYQDGNLVIQFPDYCGMILHHSHSTLDSGKGHCCLETLQP

SEQ ID NO: 70848 - protein, 447 aa, Homo sapiens
LEGILILWIIRLLFSKTYKLQERSDLTVKEKEELIEEWQPEPLVPPVPKDHPALNYNIVSGPPSHKTVVNGKECINFASFNFLGLLDNPRVKAAALASLKKYGVGTCGPRGFYGTFDVHLDLEDRLAKFMKTEEAIIYSYGFATIASAIPAYSKRGDIVFVDRAACFAIQKGLQASRSDIKLFKHNDMADLERLLKEQEIEDQKNPRKARVTRRFIVVEGLYMNTGTICPLPELVKLKYKYKARIFLEESLSFGVLGEHGRGVTEHYGINIDDIDLISANMENALASIGGFCCGRSFVIDHQRLSGQGYCFSASLPPLLAAAAIEALNIMEENPGIFAVLKEKCGQIHKALQGISGLKVVGESLSPAFHLQLEESTGSREQDVRLLQEIVDQCMNRSIALTQARYLEKEEKCLPPPSIRVVVTVEQTEEELERAASTIKEVAQAVLL

SEQ ID NO: 70849 - protein, 322 aa, Homo sapiens
VALLAALWLLWLLGSAPRGTPAPQPTITILVWHWPFTDQPPELPSDTCTRYGIARCHLSANRSLLASADAVVFHHRELQTRRSHLPLAQRPRGQPWVWASMESPSHTHGLSHLRGIFNWVLSYRRDSDIFVPYGRLEPHWGPSPPLPAKSRVAAWVVSNFQERQLRARLYRQLAPHLRVDVFGRANGRPLCASCLVPTVAQYRFYLSFENSQHRDYITEKFWRNALVAGTVPVVLGPPRATYEAFVPADAFVHVDDFGSARELAAFLTGMNESRYQRFFAWRDRLRVRLFTDWRERFCAICDRYPHLPRSQVYEDLEGWFQA

SEQ ID NO: 70850 - protein, 278 aa, Homo sapiens [sequence omitted]

SEQ ID NO: 70851 - protein, 14 aa, Homo sapiens
ILTATWSSILLCCF

SEQ ID NO: 70852 - protein, 690 aa, Homo sapiens
ILFAASLLTVFAWLLQYARGLWLARARGDRGPGPALAGEPAGSLRELGVWRSLLRLRATRAGAAEEPGVRGLLASLFAFKSFRENWQRAWVRALNEQACRNGSSIQIAFEEVPQLPPRASISHVTCVDQSEHTMVLRCQLSAEEVRFPVSVTQQSPAAVSMETYHVTLTLPPTQLEVNLEEIPGEGLLISWAFTDRPDLSLTVLPKLQARERGEEQVELSTIEELIKDAIVSTQPAMMVNLRACSAPGGLVPSEKPPMMPQAQPAIPRPNRLFLRQLRASHLGNELEGTEELCCVAELDNPMQQKWTKPARAGSEVEWTEDLALDLGPQSRELTLKVLRSSSCGDTELLGQATLPVGSPSRPLSRRQLCPLTPGPGKALGPAATMAVELHYEEGSPRNLGTPTSSTPRPSITPTKKIELDRTIMPDGTIVTTVTTVQSRPRIDGKLDSPSRSPSKVEVTEKTTTVLSESSGPSNTSHSSSRDSHLSNGLDPVAETAIRQLTEPSGRVAKKTPTKRSTLIISGVSKVPIAQDELALSLGYAASLEASVQDDAGTSGGPSSPPSDPPAMSPGPLDALSSPTSVQEADETTRSDISERPSVDDIESETGSTGALETRSLKDHKVSFLRSGTKLIFRRRPRQKEAGLSQSHDDLSNATATPSVRKKAGSFSRRLIKRFSFKSKPKANGNPSPQL

SEQ ID NO: 70853 - protein, 23 aa, Homo sapiens
IAQVVYFLGIAESLLGLLQDPQA

SEQ ID NO: 70854 - protein, 14 aa, Homo sapiens
IKIRSCLFILYKMI

SEQ ID NO: 70855 - protein, 490 aa, Homo sapiens
LLLLLSFLAPWATIALRPALRALGSLHLPTNPTSLPAVAKNYSVLYFQQKVDHFGFNTVKTFNQRYLVADKYWKKNGGSILFYTGNEGDIIWFCNNTGFMWDVAEELKAMLVFAEHRYYGESLPFGDNSFKDSRHLNFLTSEQALADFAELIKHLKRTIPGAENQPVIAIGGSYGGMLAAWFRMKYPHMVVGALAASAPIWQFEDLVPCGVFMKIVTTDFRKSGPHCSESIHRSWDAINRLSNTGSGLQWLTGALHLCSPLTSQDIQHLKDWISETWVNLAMVDYPYASNFLQPLPAWPIKVVCQYLKNPNVSDSLLLQNIFQALNVYYNYSGQVKCLNISETATSSLGTLGWSYQACTEVVMPFCTNGVDDMFEPHSWNLKELSDDCFQQWGVRPRPSWITTMYGGKNISSHTNIVFSNGELDPWSGGGVTKDITDTLVAVTISEGAHHLDLRTKNALDPMSVLLARSLEVRHMKNWIRDFYDSAGKQH

SEQ ID NO: 70856 - protein, 199 aa, Homo sapiens
LALGTVFLFGLLSFSRSVALFRGYHGPLDLYPEFYRIATDPTIHTVPEGRPVNVCVGKEWYRFPSSFLLPDNWQLQFIPSEFRGQLPKPFAEGPLATRIVPTDMNDQNLEEPSRYIDISKCHYLVDLDTMRETPREPKYSSNKEEWISLAYRPFLDASRSSKLLRAFYVPFLSDQYTVYVNYTILKPRKAKQIRKKSGG

SEQ ID NO: 70857 - protein, 67 aa, Homo sapiens
ILAVLQWTTLFFLKEPQWRQKSYHTQSLTDLSSLLPEESNMKSGVKAKRGTDGLPDYTTYSPHCYQQ

SEQ ID NO: 70858 - protein, 18 aa, Homo sapiens
RAGGALSILYHLCLINVC

SEQ ID NO: 70859 - protein, 61 aa, Homo sapiens
TTPLLCISFFHFLFQAFLFLPCGNSFGASDCSSSECAAIPVDPVPGACSKFSSVRPFAGLV

SEQ ID NO: 70860 - protein, 29 aa, Homo sapiens
ICAFFFIVLFVHFIQLFVQNAKNLDTLHQ

SEQ ID NO: 70861 - protein, 52 aa, Homo sapiens
IVLFAALMSFLTGQLFQKSVDAAPTQQEDSWTSLEHILWPFTRLRHNGPPPV

SEQ ID NO: 70862 - protein, 496 aa, Homo sapiens
IFSYERLSLKRALWALCFLGSLAVLLCVCTERVQYYFHYHHVTKLDEVAASQLTFPAVTLCNLNEFRFSQVSKNDLYHAGELLALLNNRYEIPDTQMADEKQLEILQDKANFRSFKPKPFNMREFYDRAGHDIRDMLLSCHFRGEVCSAEDFKVVFTRYGKCYTFNSGRDGRPRLKTMKGGTGNGLEIMLDIQQDEYLPVWGETDETSFEAGIKVQIHSQDEPPFIDQLGFGVAPGFQTFVACQEQRLIYLPPPWGTCKAVTMDSDLDFFDSYSITACRIDCETRYLVENCNCRMVHMPGDAPYCTPEQYKECADPALDFLVEKDQEYCVCEMPCNLTRYGKELSMVKIPSKASAKYLAKKFNKSEQYIGENILVLDIFFEVLNYETIEQKKAYEIAGLLGDIGGQMGLFIGASILTVLELFDYAYEVIKHKLCRRGKCQKEAKRSSADKGVALSLDDVKRHNPCESLRGHPAGMTYAANILPHHPARGTFEDFTC

SEQ ID NO: 70863 - protein, 433 aa, Homo sapiens
VVLCVACGFCSLLYAFSQLAVSLEEGTGGGGGKPQAAVASWLAGGGRGAVRGAGVAGPAAHPGVSDRCKDFSLCYWNPYWMLPSDVCGMNCFWEAAFRYSLKIQPVEKMHLAVVACGERLEETMTMLKSAIIFSIKPLQFHIFAEDQLHHSFKGRLDNWSFLQTFNYTLYPITFPSENAAEWKKLFKPCASQRLFLPLILKEVDSLLYVDTDILFLRPVDDIWSLLKKFNSTQIAAMAPEHEEPRIGWYNRFARHPYYGKTGVNSGVMLMNMTRMRRKYFKNDMTTVRLQWGDILMPLLKKYKLNITWGDQDLLNIVFFHNPESLFVFPCQWNYRPDHCIYGSNCQEAEEGGIFILHGNRGVYHDDKQPAFRAVYEALRNCSFEDDNIRSLLKPLELELQKTVHTYCGKIYKIFIKQLAKSVRDRYARSPKEK

SEQ ID NO: 70864 - protein, 310 aa, Homo sapiens
LAAAALVLISIVAFTTATKMPALHRHEEEKFFLNAKGQKETLPSIWDSPTKQLSVVVPSYNEEKRLPVMMDEALSYLEKRQKRDPAFTYEVIVVDDGSKDQTSKVAFKYCQKYGSDKVRVITLVKNRGKGGAIRMGIFSSRGEKILMADADGATKFPDVEKLEKGLNDLQPWPNQMAIACGSRAHLEKESIAQRSYFRTLLMYGFHFLVWFLCVKGIRDTQCGFKLFTREAASRTFSSLHVERWAFDVELLYIAQFFKIPIAEIAVNWTEIEGSKLVPFWSWLQMGKDLLFIRLRYLTGAWRLEQTRKMN

SEQ ID NO: 70865 - protein, 12 aa, Homo sapiens
IRAWKTFLVIYS

SEQ ID NO: 70866 - protein, 270 aa, Homo sapiens
LAVLVLLLWGAPWTHGRRSNVRVITDENWRELLEGDWMIEFYAPWCPACQNLQPEWESFAEWGEDLEVNIAKVDVTEQPGLSGRFIITALPTIYHCKDGEFRRYQGPRTKKDFINFISDKEWKSIEPVSSWFGPGSVLMSSMSALFQLSMWIRTCHNYFIEDLGLPVWGSYTVFALATLFSGLLLGLCMIFVADCLCPSKRRRPQPYPYPSKKLLSESAQPLKKVEEEQEADEEDVSEEEAESKEGTNKDFPQNAIRQRSLGPSLATDKS

SEQ ID NO: 70867 - protein, 41 aa, Homo sapiens
RLVVTWMIVPVMLKPLIDLITTGFSQDYKNFLKVTTLGITR

SEQ ID NO: 70868 - protein, 20 aa, Homo sapiens
ILCWILMLCLLRLNTIMPSW

SEQ ID NO: 70869 - protein, 15 aa, Homo sapiens
IESEILLLIWGTISV

SEQ ID NO: 70870 - protein, 1121 aa, Homo sapiens
ISSLTWFTTIVPLVLVITMTAVKDATDDYFRHKSDNQVNNRQSEVLINSKLQNEKWMNVKVGDIIKLENNQFVAADLLLLSSSEPHGLCYVETAELDGETNLKVRHALSVTSELGADISRLAGFDGIVVCEVPNNKLDKFMGILSWKDSKHSLNNEKIILRGCILRNTSWCFGMVIFAGPDTKLMQNSGKTKFKRTSIDRLMNTLVLWIFGFLICLGIILAIGNSIWESQTGDQFRTFLFWNEGEKSSVFSGFLTFWSYIIILNTVVPISLYVSVEVIRLGHSYFINWDRKMYYSRKAIPAVARTTTLNEELGQIEYIFSDKTGTLTQNIMTFKRCSINGRIYGEVHDDLDQKTEITQEKEPVDFSVKSQADREFQFFDHHLMESIKMGDPKVHEFLRLLALCHTVMSEENSAGELIYQVQSPDEGALVTAARNFGFIFKSRTPETITIEELGTLVTYQLLAFLDFNNTRKRMSVIVRNPEGQIKLYSKGADTILFEKLHPSNEVLLSLTSDHLSEFAGEGLRTLAIAYRDLDDKYFKEWHKMLEDANAATEERDERIAGLYEEIERDLMLLGATAVEDKLQEGVIETVTSLSLANIKIWVLTGDKQETAINIGYACNMLTDDMNDVFVIAGNNAVEVREELRKAKQNLFGQNRNFSNGHVVCEKKQQLELDSIVEETITGDYALIINGHSLAHALESDVKNDLLELACMCKTVICCRVTPLQKAQVVELVKKYRNAVTLAIGDGANDVSMIKSAHIGVGISGQEGLQAVLASDYSFAQFRYLQRLLLVHGRWSYFRMCKFLCYFFYKNFAFTLVHFWFGFFCGFSAQTVYDQWFITLFNIVYTSLPVLAMGIFDQDVSDQNSVDCPQLYKPGQLNLLFNKRKFFICVLHGIYTSLVLFFIPYGAFYNVAGEDGQHIADYQSFAVTMATSLVIVVSVQIALDTSYWTFINHVFIWGSIAIYFSILFTMHSNGIFGIFPNQFPFVGNARHSLTQKCIWLVILLTTVASVMPVVAFRFLKVDLYPTLSDQIRRWQKAQKKARPPSSRRPRTRRSSSRRSGYAFAHQEGYGELITSGKNMRAKNPPPTSGLEKTHYNSTSWIENLCKKTTDTVSSFSQDKTVKL

SEQ ID NO: 70871 - protein, 70 aa, Homo sapiens
VLLRVLILLLSWAAGMGDRDFDDGVLGLAWVGAPSGSSGGICEKSKLYSDVPTMGKLHSKEKPIKSSSPN

SEQ ID NO: 70872 - protein, 401 aa, Homo sapiens
LLPDGLLFLLLLLMLLADPALPAGRHPPVVLVPGDLGNQLEAKLDKPTVVHYLCSKKTESYFTIWLNLELLLPVIIDCWIDNIRLVYNKTSRATQFPDGVDVRVPGFGKTFSLEFLDPSKSSVGSYFHTMVESLVGWGYTRGEDVRGAPYDWRRAPNENGPYFLALREMIEEMYQLYGGPVVLVAHSMGNMYTLYFLQRQPQAWKDKYIRAFVSLGAPWGGVAKTLRVLASGDNNRIPVIGPLKIREQQRSAVSTSWLLPYNYTWSPEKVFVQTPTINYTLRDYRKFFQDIGFEDGWLMRQDTEGLVEATMPPGVQLHCLYGTGVPTPDSFYYESFPDRDPKICFGDGDGTVNLKSALQCQAWQSRQEHQVLLQELPGSEHIEMLANATTLAYLKRVLLGP

SEQ ID NO: 70873 - protein, 43 aa, Homo sapiens
VALVFATYLLKPLFPTCPVPEEAAKLVACHSVQLIVHQPTQVI

SEQ ID NO: 70874 - protein, 39 aa, Homo sapiens
RGLRCSWEGLAVLDSLLLTLLPQLQEAWQQRTPSPVPGG

SEQ ID NO: 70875 - protein, 32 aa, Homo sapiens
LEDVPLLTWLLGCLSLVLVVVTNEIVKLHEIR

SEQ ID NO: 70876 - protein, 774 aa, Homo sapiens
IKDIARLTLLSVAMLASSKRMNSSSRSQILLRWKSDKAQSGPYNVEKEILTSRFLRDTETCRQNFRNFPYPDLAGPRKALSQLRELCLKWLRPEIHSKEQILELLVLEQFLTILPGEVRTWVKSQYPESSEEAVTLVEDLTQILEEEAPQNSTLSQDTPEEDPRGKHAFQTGWLNDLVTKESMTFKDVAVDITQEDWELMRPVQKELYKTVTLQNYWNMVSLGLTVYRPTVIPILEEPWMVIKEILEGPSPEWETKAQACTPVEDMSKLTKEETHTIKLEDSYDYDDRLERRGKGGFWKIHTDERGFSLKSVLSQEYDPTEECLSKYDIYRNNFEKHSNLIVQFDTQLDNKTSVYNEGRATFNHVSYGIVHRKILPGEKPYKCNVCGKKFRKYPSLLKHQSTHAKEKSYECEECGKEFRHISSLIAHQRMHTGEKPYECHQCGKAFSQRAHLTIHQRIHTGEKPYKCDDCGKDFSQRAHLTIHQRTHTGEKPYKCLECGKTFSHSSSLINHQRVHTGEKPYICNECGKTFSQSTHLLQHQKIHTGKKPYKCNECWKVFSQSTYLIRHQRIHSGEKCYKCNECGKAFAHSSTLIQHQTTHTGEKSYICNICGKAFSQSANLTQHHRTHTGEKPYKCSVCGKAFSQSVHLTQHQRIHNGEKPFKCNICGKAYRQGANLTQHQRIHTGEKPYKCNECGKAFIYSSSLNQHQRTHTGERPYKCNECDKDFSQRTCLIQHQRIHTGEKPYACRICGKTFTQSTNLIQHQRVHTGAKHRN

SEQ ID NO: 70877 - protein, 16 aa, Homo sapiens
ISFCVFDVFCLFCFLK

SEQ ID NO: 70878 - protein, 21 aa, Homo sapiens
LASWASILGFVVMMSLDVGLG

SEQ ID NO: 70879 - protein, 113 aa, Homo sapiens
LSTGLSVGVFFLQFLDWWYSSENQETIKSLTALPTPPPPVHLDYNSDSPLLPKMKTVCPLCRKTRVNDTVLATSGYVFCYRCVFHYVRSHQACPITGYPTEVQHLIKLYSPEN

SEQ ID NO: 70880 - protein, 11 aa, Homo sapiens
IAAVFFFFPSL

SEQ ID NO: 70881 - protein, 39 aa, Homo sapiens
LSNFLFLVWLLWCAKLRTLLFCHTATPYRCGRCEICHQL

SEQ ID NO: 70882 - protein, 26 aa, Homo sapiens
KLSMNPFLLLMILAPIIVDTMTYKQY

SEQ ID NO: 70883 - protein, 962 aa, Homo sapiens
LLIHFVFFASIFDIYFTSPLVHGMTPQFTPLPPPARRLVLFVADGLRADALYELDENGNSRAPFIRNIIMHEGSWGISHTRVPTESRPGHVALIAGFYEDVSAVAKGWKENPVEFDSLFNESKYTWSWGSPDILPMFAKGASGDHVYTYSYDAKREDFGAQDATKLDTWVFDNVKDFFHHARNNQSLFSKINEEKIVFFLHLLGIDTNGHAHRPSSRDYKHNIKKVDDGVKEIVSMFNHFYGNDGKTTFIFTSDHGMTDWGSHGAGHPSETLTPLVTWGAGIKYPQRVSAQQFDDAFLKEWRLENWKRLDVNQADIAPLMTSLIGVPFPLNSVGILPVDYLNNTDLFKAESMFTNAVQILEQFKVKMTQKKEVTLPFLFTPFKLLSDSKQFNILRKARSYIKHRKFDEVVSLCKELIHLALKGLSYYHTYDRFFLGVNVVIGFVGWISYASLLIIKSHSNLIKGVSKEVKKPSHLLPCSFVAIGILVAFFLLIQACPWTYYVYGLLPLPIWYAVLREFQVIQDLVVSVLTYPLSHFVGYLLAFTLGIEVLVLSFFYRYMLTAGLTAFAAWPFLTRLWTRAKMTSLSWTFFSLLLAVFPLMPVVGRKPDISLVMGAGLLVLLLSLCVVTSLMKRKDSFIKEELLVHLLQVLSTVLSMYVVYSTQSSLLRKQGLPLMNQIISWATLASSLVVPLLSSPVLFQRLFSILLSLMSTYLLLSTGYEALFPLVLSCLMFVWINIEQETLQQSGVCCKQKLTSIQFSYNTDITQFRQLYLDDIRRAFFLVFFLVTAFFGTGNIASINSFDLASVYCFLTVFSPFMMGALMMWKILIPFVLVMCAFEAVQLTTQLSSKSLFLIVLVISDIMALHFFFLVKDYGSWLDIGTRQLLACTAWLFMYISASPNRLWMLSDPGLDLNLLHAIRACISHYVIVMSMTIFLVFLNGLAQLLTTKKLRLCGKPKSHFM

SEQ ID NO: 70884 - protein, 38 aa, Homo sapiens
RMYLAMVLLGATHGLIFLPVLLSYIDDLKVPVLQSETG

SEQ ID NO: 70885 - protein, 292 aa, Homo sapiens
KRDHRQVLSSLLSGALAGALAKTAVAPLDRTKIIFQVSSKRFSAKEAFRVLYYTYLNEGFLSLWRGNSATMVRVVPYAAIQFSAHEEYKRILGSYYGFRGEALPPWPRLFAGALAGTTAASLTYPLDLVRARMAVTPKEMYSNIFHVFIRISREEGLKTLYHGFMPTVLGVIPYAGLSFFTYETLKSLHREYSGRRQPYPFERMIFGACAGLIGQSASYPLDVVRRRMQTAGVTGYPRASIARTLRTIVREEGAVRGLYKGLSMNWVKGPIAVGISFTTFDLMQILLRHLQS

SEQ ID NO: 70886 - protein, 46 aa, Homo sapiens
ILFLLGILIVISKKVKCRKADSRSESPTCKSCKSELPSSAPGGGGV

SEQ ID NO: 70887 - protein, 183 aa, Homo sapiens
LAVIAILLFILLWHLCWPKEKADPYPYPGLVCGVPNTHTPSSSHLSSPGALETGDTWKEASLLPLLSRELSSLASQPLSRLLDELEVLEELIVLLDPEPGPGGGMAHGTTRHLAARYGLPAAWSTFAYSLRPSRSPLRALIEMVVAREPSASLGQLGTHLAQLGRADALRVLSKLGSSGVCWA

SEQ ID NO: 70888 - protein, 510 aa, Homo sapiens
IFILTFLLYASFHLSRKPISIVKGELHKYCTAWDEADVRFSSQNRKSGSAAPHQLPDNETDCGWAPFDKNNYQQLLGALDYSFLCAYAVGMYLSGIIGERLPIRYYLTFGMLASGAFTALFGLGYFYNIHSFGFYVVTQVINGLVQTTGWPSVVTCLGNWFGKGRRGLIMGVWNSHTSVGNILGSLIAGYWVSTCWGLSFVVPGAIVAAMGIVCFLFLIEHPNDVRCSSTLVTHSKGYENGTNRLRLQKQILKSEKNKPLDPEMQCLLLSDGKGSIHPNHVVILPGDGGSGTAAISFTGALKIPGVIEFSLCLLFAKLVSYTFLFWLPLYITNVDHLDAKKAGELSTLFDVGGIFGGILAGVISDRLEKRASTCGLMLLLAAPTLYIFSTVSKMGLEATIAMLLLSGALVSGPYTLITTAVSADLGTHKSLKGNAHALSTVTAIIDGTGSVGAALGPLLAGLLSPSGWSNVFYMLMFADACALLFLIRLIHKELSCPGSATGDQVPFKEQ

SEQ ID NO: 70889 - protein, 8 aa, Homo sapiens
MMITMIIL

SEQ ID NO: 70890 - protein, 13 aa, Homo sapiens
IGQLHYLSTSLLL

SEQ ID NO: 70891 - protein, 155 aa, Homo sapiens [sequence omitted]

SEQ ID NO: 70892 - protein, 49 aa, Homo sapiens
ILVPLVLLRQMLLELTRRGQEPLSALLQFGVTYLEDYSAEYIIQQGGWV

SEQ ID NO: 70893 - protein, 348 aa, Homo sapiens
LGFFGLSLALHLLTLCCYLELRSELRRERGAESRLGGSGTPGTSGTLSSLGGLDPDSPITSHLGQPSPKQQPLEPGEAALHSDSQDGHQMALLNFFFPDEKPYSEEESRRVRRNKRSKSNEGADGPVKNKKKGKKAGPPGPNGPPGPPGPPGPQGPPGIPGIPGIPGTTVMGPPGPPGPPGPQGPPGLQGPSGAADKAGTRENQPAVVHLQGQGSAIQVKNDLSGGVLNDWSRITMNPKVFKLHPRSGELEVLVDGTYFIYSQVEVYYINFTDFASYEVVVDEKPFLQCTRSIETGKTNYNTCYTAGVCLLKARQKIAVKMVHADISINMSKHTTFFGAIRLGEAPAS

SEQ ID NO: 70894 - protein, 28 aa, Homo sapiens
LVILFSYMAGPLCKYLLDLLRLPAKKID

SEQ ID NO: 70895 - protein, 574 aa, Homo sapiens
VLLFLCLLLKTCEPKTANAFKPNILLIMADDLGTGDLGCYGNNTLRTPNIDQLAEEGVRLTQHLAAAPLCTPSRAAFLTGRHSFRSGMDASNGYRALQWNAGSGGLPENETTFARILQQHGYATGLIGKWHQGVNCASRGDHCHHPLNHGFDYFYGMPFTLTNDCDPGRPPEVDAALRAQLWGYTQFLALGILTLAAGQTCGFFSVSARAVTGMAGVGCLFFISWYSSFGFVRRWNCILMRNHDVTEQPMVLEKTASLMLKEAVSYIERHKHGPFLLFLSLLHVHIPLVTTSAFLGKSQHGLYGDNVEEMDWLIGKVLNAIEDNGLKNSTFTYFTSDHGGHLEARDGHSQLGGWNGIYKGGKGMGGWEGGIRVPGIFHWPGVLPAGRVIGEPTSLMDVFPTVVQLVGGEVPQDRVIDGHSLVPLLQGAEARSAHEFLFHYCGQHLHAARWHQKDSGSVWKVHYTTPQFHPEGAGACYGRGVCPCSGEGVTHHRPPLLFDLSRDPSEARPLTPDSEPLYHAVIARVGAAVSEHRQTLSPVPQQFSMSNILWKPWLQPCCGHFPFCSCHEDGDGTP

SEQ ID NO: 70896 - protein, 82 aa, Homo sapiens
IGFAGLIGLLLARGSKIKKLVYPPGFMGLAASLYYPQQAIVFAQVSGERLYDWGLRGYIVIEDLWKENFQKPGNVKNSPGTK

SEQ ID NO: 70897 - protein, 39 aa, Homo sapiens
MQILMRTVLVTELLSNLCPLVRTSAPGEETELHKVAVWV

SEQ ID NO: 70898 - protein, 66 aa, Homo sapiens
MVNLAWLPVRCVGWLASEMLFTLKQSVSVAFHVQEVTRQTPRRQAFWPDFRVSLQQRKQKFFRNNL

SEQ ID NO: 70899 - protein, 205 aa, Homo sapiens
MCPARSLLLVATLVLLDHLSLARNLPVATPDPGMFPCLHHSQNLLRAVSNMLQKARQTLEFYPCTSEEIDHEDITKDKTSTVEACLPLELTKNGSCLASRKTSFMMALCLSSIYEDLKMYQVEFKTMNAKLLMDPKRQIFLDQNMLAVIDELMQALNFNSETVPQKSSLEEPDFYKTKIKLCILLHAFRIRAVTIDRVMSYLNAS

SEQ ID NO: 70900 - protein, 22 aa, Homo sapiens
MITLALCPTLLMALGGPWLILS

SEQ ID NO: 70901 - protein, 1132 aa, Homo sapiens [sequence omitted]

SEQ ID NO: 70902 - protein, 1131 aa, Homo sapiens [sequence omitted]

SEQ ID NO: 70903 - protein, 219 aa, Homo sapiens
MAPRTLLLLLSGTLALAETWAGSHSMRYFSTAVSWPGRGEPSFIAVGYVDDTQFVRVDSDAVSLRMKTRARWVEQEGPEYWDLQTLGAKAQAQTDRVNLRTLLRYYNQSEADPPQDTRDPPPSLNMRHNEVLGSGLLPCGDHIDLAAGWGGPDPGHGARGDQAHRGWNLPEVGGCGSAFWRGTEIHMPCAAQGAAQAPHPEMGHTFLETSQGSKTRRFL

SEQ ID NO: 70904 - protein, 98 aa, Homo sapiens
MILFLIMLVLVLFGYGVLSPRSLMPGSLERGFCMAVREPDHLQRVSLPRMVYPQPKVLTPCRKDVLVVPLGWLPLSGRAHSTSTSSTSSSGSRTPPLG

SEQ ID NO: 70905 - protein, 112 aa, Homo sapiens
MLFLISWMSTSISPLYPSLLVWISRYTTASSCSPSLGAGPAGTPRRSPSTVAAAPQRWPPPLTLRWHTSPYPPESPSTCCLYRQALGSWPLALCLQHCHLHVDWEPHSPRTC

SEQ ID NO: 70906 - protein, 16 aa, Homo sapiens
RNSTSGLYVLTFMLGP

SEQ ID NO: 70907 - protein, 24 aa, Homo sapiens
LFVIVGFAAFAYTVKYVLRSIAQE

SEQ ID NO: 70908 - protein, 7 aa, Homo sapiens
IIVSLMI

SEQ ID NO: 70909 - protein, 426 aa, Homo sapiens
LTSGDVTKRLLIQKNCLLLLTYLISELEAARMLCVNAPPKKAQEGGGSEVFQELKGICIALGMSKPPANITMFQFFSGIEKKLKETLAKVPPNHVGKPLLKKPMGPAHWEKIEAINQAIANEYEVRRKLLIKRLDVTVQSFGWSDRAKSQTEKLAKVYQPKRSVLSPKTTISVAHLLAARQDLSKILRTSSGSIREKTACAINKVLMGRVPDRGGRPNEIEPPPPEMPPWQKRQDGPQQQTGGRGGGRGGYEHSSYGGRGGHEQGGGRGGRGGYDHGGRGGGRGNKHQGGWTDGGSGGGGGYQDGGYRDSGFQPGGYHGGHSSGGYQGGGYGGFQTSSSYTGSGYQGGGYQQDNRYQDGGHHGDRGGGRGGRGGRGGRGGRAGQGGGWGGRGSQNYHQGGQFEQHFQHGGYQYNHSGFGQGRHYTS

SEQ ID NO: 70910 - protein, 47 aa, Homo sapiens
IILYFLASFYTKYDPTHFILNTASLLSVLIPKMPQLHGVRIFGINKY

SEQ ID NO: 70911 - protein, 26 aa, Homo sapiens
LFFSFLVLLTLDDDLDVVRRDQIPVF

SEQ ID NO: 70912 - protein, 18 aa, Homo sapiens
IYWLLLEGRTVLMALSVA

SEQ ID NO: 70913 - protein, 24 aa, Homo sapiens
MPRRRPSEHSLASLAATWLCCVCA

SEQ ID NO: 70914 - protein, 75 aa, Homo sapiens
TLFALLAGTAVMIIAYHTVCTPRDLAVPAALTPRASPGHSPHYFAASSPTSPNALPPARKASPPSGLWSPAYASH

SEQ ID NO: 70915 - protein, 409 aa, Homo sapiens
LLLLLALCGAGTTAAELSYSLRGNWSICNGNGSLELPGAVPGCVHSALFQQGLIQDSYYRFNDLNYRWVSLDNWTYSKEFKIPFEISKWQKVNLILEGVDTVSKILFNEVTIGETDNMFNRYSFDITNVVRDVNSIELRFQSAVLYAAQQSKAHTRYQVPPDCPPLVQKGECHVNFVRKEQCSFSWDWGPSFPTQGIWKDVRIEAYNICHLNYFTFSPIYDKSAQEWNLEIESTFDVVSSKPVGGQVIVAIPKLQTQQTYSIELQPGKRIVELFVNISKNITVETWWPHGHGNQTGYNMTVLFELDGGLNIEKSAKVYFRTVELIEEPIKGSPGLSFYFKINGFPIFLKGSNWIPADSFQDRVTSELLRLLLQSVVDANMNTLRVWGGGIYEQDEFYELCDELGIMVCI

SEQ ID NO: 70916 - protein, 20 aa, Homo sapiens
ILQSLLILFLGVTIFEAKLT

SEQ ID NO: 70917 - protein, 28 aa, Homo sapiens
MASCWICVLLYLCTLVAPLCCPTREFSV

SEQ ID NO: 70918 - protein, 221 aa, Homo sapiens
IGNCPFSQRLFMVLWLKGVTFNVTTVDTKRRTETVQKLCPGGQLPFLLYGTEVHTDTNKIEEFLEAVLCPPRYPKLAALNPESNTAGLDIFAKFSAYIKNSNPALNDNLEKGLLKALKVLDNYLTSPLPEEVDETSAEDEGVSQRKFLDGNELTLADCNLLPKLHIVQVVCKKYRGFTIPEAFRGVHRYLSNAYAREEFASTCPDDEEIELAYEQVAKALK

SEQ ID NO: 70919 - protein, 122 aa, Homo sapiens
IFFWCLAFLWGLLILLKYRWRKLEEEEQAMYEMVKKIIDVVQDHYVDWEQDMERYPYVGILHVRDSLIPPQSRRRMKRVWDRAVEFLASNESRIQTESHRVAGEDMLVWRWTKPSSFSDSER

SEQ ID NO: 70920 - protein, 35 aa, Homo sapiens
VLFCILQFLSMTWYSLSYIPYARDAVIKCCSSLLS

SEQ ID NO: 70921 - protein, 17 aa, Homo sapiens
LAPQVWDFWVFSWLASC

SEQ ID NO: 70922 - protein, 90 aa, Homo sapiens
LLLGLHLFLLTAGPALGWNDPDRMLLRDVKALTLHYDRYTTSRRLDPIPQLKCVGGTAGCDSYTPKVIQCQNKGWDGYDVQVISTTVMAV

SEQ ID NO: 70923 - protein, 9 aa, Homo sapiens
LWKAVFFLS

SEQ ID NO: 70924 - protein, 536 aa, Homo sapiens
ILHTRTHWLLLGLALLCSLVLFMYLLECAPQTDGNASLPGVVGENYGKEYYQALLQEQEEHYQTRATSLKRQIAQLKQELQEMSEKMRSLQERRNVGANGIGYQSNKEQAPSDLLEFLHSQIDKAEVSIGAKLPSEYGVIPFESFTLMKVFQLEMGLTRHPEEKPVRKDKRDELVEVIEAGLEVINNPDEDDEQEDEEGPLGEKLIFNENDFVEGYYRTERDKGTQYELFFKKADLTEYRHVTLFRPFGPLMKVKSEMIDITRSIINIIVPLAERTEAFVQFMQNFRDVCIHQDKKIHLTVVYFGKEGLSKVKSILESVTSESNFHNYTLVSLNEEFNRGRGLNVGARAWDKGEVLMFFCDVDIYFSAEFLNSCRLNAEPGKKVFYPVVFSLYNPAIVYANQEVPPPVEQQLVHKKDSGFWRDFGFGMTCQYRSDFLTIGGFDMEVKGWGGEDVHLYRKYLHGDLIVIRTPVPGLFHLWHEKRCADELTPEQYRMCIQSKAMNEASHSHLGMLVFREEIETHLHKQAYRTNSEAVG

SEQ ID NO: 70925 - protein, 96 aa, Homo sapiens
LVLLSLGCFFSVAETLHSMRYFDRAALFVEACLKYGAFEVTEDTEKLITAIYADYARSLKNLGFKQGAVLFASKAGAAGKDLLNELESPKEEPIEE

SEQ ID NO: 70926 - protein, 569 aa, Homo sapiens
TGFQSPSAPCLCSSMAARLLLLGILLLLLPLPVPAPCHTAARSECKRSHKFVPGAWLAGEGVDVTSLRRSGSFPVDTQRFLRPDGTCTLCENALQEGTLQRLPLALTNWRAQGSGCQRHVTRAKVSSTEAVARDAARSIRNDWKVGLDVTPKPTSNVHVSVAGSHSQAANFAAQKTHQDQYSFSTDTVECRFYSFHVVHTPPLHPDFKRALGDLPHHFNASTQPAYLRLISNYGTHFIRAVELGGRISALTALRTCELALEGLTDNEVEDCLTVEAQVNIGIHGSISAEAKACEEKKKKHKMTASFHQTYRERHSEVVGGHHTSINDLLFGIQAGPEQYSAWVNSLPGSPGLVDYTLEPLHVLLDSQDPRREALRRALSQYLTDRARWRDCSRPCPPGRQKSPRDPCQCVCHGSAVTTQDCCPRQRGLAQLEVTFIQAWGLWGDWFTATDAYVKLFFGGQELRTSTVWDNNNPIWSVRLDFGDVLLATGGPLRLQVWDQDSGRDDDLLGTCDQAPKSGSHEVRCNLNHGHLKFRYHARCLPHLGGGTCLDYVPQMLLGEPPGNRSGAVW

SEQ ID NO: 70927 - protein, 72 aa, Homo sapiens
LAISAIAVFLVLVSACILRFGTRSLCNSIISLNTTISCSEAQKIPWTPPGTALQFYSNLHNAEVRPKDRRKN

SEQ ID NO: 70928 - protein, 26 aa, Homo sapiens
ILLFFCGSELLLEVLTLAAFSSMDRI

SEQ ID NO: 70929 - protein, 112 aa, Homo sapiens
KLMLASMFHSLFAIGSQLSPEQGSSGIEMLETDTFKLHCYQTLTGIKFVVLADPRQAGIDSLLRKIYEIYSDFALKNPFYSLEMPIRCELFDQNLKLALEVAEKAGTFGPGS

SEQ ID NO: 70930 - protein, 187 aa, Homo sapiens
RTETDMEQGKGLAVLILAIILLQGTLAQSIKGNHLVKVYDYQEDGSVLLTCDAEAKNITWFKDGKMIGFLTEDKKKWNLGSNAKDPRGMYQCKGSQNKSKPLQVYYRMCQNCIELNAATISGFLFAEIVSIFVLAVGVYFIAGQDGVRQSRASDKQTLLPNDQLYQPLKDREDDQYSHLQGNQLRRN

SEQ ID NO: 70931 - protein, 927 aa, Homo sapiens
LVLAFLGVCLGITLAVDRSNFKTCEESSFCKRQRSIRPGLSPYRALLDSLQLGPDSLTVHLIHEVTKVLLVLELQGLQKNMTRFRIDELEPRRPRYRVPDVLVADPPIARLSVSGRDENSVELTMAEGPYKIILTARPFRLDLLEDRSLLLSVNARGLLEFEHQRAPRVSQGSKDPAEGDGAQPEETPRDGDKPEETQGKAEKDEPGAWEETFKTHSDSKPYGPMSVGLDFSLPGMEHVYGIPEHADNLRLKVTEGGEPYRLYNLDVFQYELYNPMALYGSVPVLLAHNPHRDLGIFWLNAAETWVDISSNTAGKTLFGKMMDYLQGSGETPQTDVRWMSETGIIDVFLLLGPSISDVFRQYASLTGTQALPPLFSLGYHQSRWNYRDEADVLEVDQGFDDHNLPCDVIWLDIEHADGKRYFTWDPSRFPQPRTMLERLASKRRKLVAIVDPHIKVDSGYRVHEELRNLGLYVKTRDGSDYEGWCWPGSAGYPDFTNPTMRAWWANMFSYDNYEGSAPNLFVWNDMNEPSVFNGPEVTMLKDAQHYGGWEHRDVHNIYGLYVHMATADGLRQRSGGMERPFVLARAFFAGSQRFGAVWTGDNTAEWDHLKISIPMCLSLGLVGLSFCGADVGGFFKNPEPELLVRWYQMGAYQPFFRAHAHLDTGRREPWLLPSQHNDIIRDALGQRYSLLPFWYTLLYQAHREGIPVMRPLWVQYPQDVTTFNIDDQYLLGDALLVHPVSDSGAHGVQVYLPGQGEVWYDIQSYQKHHGPQTLYLPVTLSSIPVFQRGGTIVPRWMRVRRSSECMKDDPITLFVALSPQGTAQGELFLDDGHTFNYQTRQEFLLRRFSFSGNTLVSSSADPEGHFETPIWIERVVIIGAGKPAAVVLQTKGSPESRLSFQHDPETSVLVLRKPGINVASDWSIHLR

SEQ ID NO: 70932 - protein, 13 aa, Homo sapiens
LLWLSLICLLGLL

SEQ ID NO: 70933 - protein, 300 aa, Homo sapiens
KYYALCGFGGVLSCGLTHTAVVPLDLVKCRMQVDPQKYKGIFNGFSVTLKEDGVRGLAKGWAPTFLGYSMQGLCKFGFYEVFKVLYSNMLGEENTYLWRTSLYLAASASAEFFADIALAPMEAAKVRIQTQPGYANTLRDAAPKMYKEEGLKAFYKGVAPLWMRQIPYTMMKFACFERTVEALYKFVVPKPRSECSKPEQLVVTFVAGYIAGVFCAIVSHPADSVVSVLNKEKGSSASLVLKRLGFKGVWKGLFARIIMIGTLTALQWFIYDSVKVYFRLPRPPPPEMPESLKKKLGLTQ

SEQ ID NO: 70934 - protein, 177 aa, Homo sapiens
ILLVLVVTGLSVSVTSLIQKSSIEKCSVDIQQSRNKTTERPGLLNCPIYWQQLREKCLLFSHTVNPWNNSLADCSTKESSLLLIRDKDELIHTQNLIRDKAILFWIGLNFSLSEKNWKWINGSFLNSNDLEIRGDAKENSCISISQTSVYSEYCSTEIRWICQKELTPVRNKVYPDS

SEQ ID NO: 70935 - protein, 19 aa, Homo sapiens
IAAIFKIHFIYFFCRSGVL

SEQ ID NO: 70936 - protein, 810 aa, Homo sapiens
LRTFCLIFGLGAVWGLGVDPSLQIDVLTELELGESTTGVRQVPGLHNGTKAFLFQDTPRSIKASTATAEQFFQKLRNKHEFTILVTLKQTHLNSGVILSIHHLDHRYLELESSGHRNEVRLHYRSGSHRPHTEVFPYILADDKWHKLSLAISASHLILHIDCNKIYERVVEKPSTDLPLGTTFWLGQRNNAHGYFKGIMQDVQLLVMPQGFIAQCPDLNRTCPTCNDFHGLVQKIMELQDILAKTSAKLSRAEQRMNRLDQCYCERTCTMKGTTYREFESWIDGCKNCTCLNGTIQCETLICPNPDCPLKSALAYVDGKCCKECKSICQFQGRTYFEGERNTVYSSSGVCVLYECKDQTMKLVESSGCPALDCPESHQITLSHSCCKVCKGYDFCSERHNCMENSICRNLNDRAVCSCRDGFRALREDNAYCEDIDECAEGRHYCRENTMCVNTPGSFMCICKTGYIRIDDYSCTEHDECITNQHNCDENALCFNTVGGHNCVCKPGYTGNGTTCKAFCKDGCRNGGACIAANVCACPQGFTGPSCETDIDECSDGFVQCDSRANCINLPGWYHCECRDGYHDNGMFSPSGESCEDIDECGTGRHSCANDTICFNLDGGYDCRCPHGKNCTGDCIHDGKVKHNGQIWVLENDRCSVCSCQNGFVMCRRMVCDCENPTVDLFCCPECDPRLSSQCLHQNGETLYNSGDTWVQNCQQCRCLQGEVDCWPLPCPDVECEFSILPENECCPRCVTDPCQADTIRNDITKTCLDEMNVVRFTGSSWIKHGTECTLCQCKNGHICCSVDPQCLQEL

SEQ ID NO: 70937 - protein, 19 aa, Homo sapiens
MSLLLFSGCFFLFWNNTFL

SEQ ID NO: 70938 - protein, 93 aa, Homo sapiens
KTLGYGVPMLLLIVGGSFGLREFSQIRYDAVKSKMDPELEKKLKENKISLESEYEKIKDSKFDDWKNIRGPRPWEDPDLLQGRNPESLKTKTT

SEQ ID NO: 70939 - protein, 26 aa, Homo sapiens
KWKQRKKNPRSLMMTWALVFLTKPLL

SEQ ID NO: 70940 - protein, 9 aa, Homo sapiens
LPFFFLFSL

SEQ ID NO: 70941 - protein, 35 aa, Homo sapiens
VTNTTFLLMAASIYLHDQNPDAALRALHQGDSLEW

SEQ ID NO: 70942 - protein, 713 aa, Homo sapiens
KTVSLLALIMAYQRAYPLEVTKLIYCSRTVPEIEKVIEELRKLLNFYEKQEGEKLPFLGLALSSRKNLCIHPEVTPLRFGKDVDGKCHSLTASYVRAQYQHDTSLPHCRFYEEFDAHGREVPLPAGIYNLDDLKALGRRQGWCPYFLARYSILHANVVVYSYHYLLDPKIADLVSKELARKAVVVFDEAHNIDNVCIDSMSVNLTRRTLDRCQGNLETLQKTVLRIKETDEQRLRDEYRRLVEGLREASAARETDAHLANPVLPDEVLQEAVPGSIRTAEHFLGFLRRLLEYVKWRLRVQHVVQESPPAFLSGLAQRVCIQRKPLRFCAERLRSLLHTLEITDLADFSPLTLLANFATLVSTYAKGFTIIIEPFDDRTPTIANPILHFSCMDASLAIKPVFERFQSVIITSGTLSPLDIYPKILDFHPVTMATFTMTLARVCLCPMIIGRGNDQVAISSKFETREDIAVIRNYGNLLLEMSAVVPDGIVAFFTSYQYMESTVASWYEQGILENIQRNKLLFIETQDGAETSVALEKYQEACENGRGAILLSVARGKVSEGIDFVHHYGRAVIMFGVPYVYTQSRILKARLEYLRDQFQIRENDFLTFDAMRHAAQCVGRAIRGKTDYGLMVFADKRFARGDKRGKLPRWIQEHLTDANLNLTVDEGVQVAKYFLRQMAQPFHREDQLGLSLLSLEQLESEETLKRIEQIAQQL

SEQ ID NO: 70943 - protein, 348 aa, Homo sapiens
VFVVLLALVAGVLGNEFSILKSPGSVVFRNGNWPIPGERIPDVAALSMGFSVKEDLSWPGLAVGNLFHRPRATVMVMVKGVNKLALPPGSVISYPLENAVPFSLDSVANSIHSLFSEETPVVLQLAPSEERVYMVGKANSVFEDLSVTLRQLRNRLFQENSVLSSLPLNSLSRNNEVDLLFLSELQVLHDISSLLSRHKHLAKDHSPDLYSLELAGLDEIGKRYGEDSEQFRDASKILVDALQKFADDMYSLYGGNAVVELVTVKSFDTSLIRKTRTILEAKQAKNPASPYNLAYKYNFEYSVVFNMVLWIMIALALAVIITSYNIWNMDPGYDSIIYRMTNQKIRMD

SEQ ID NO: 70944 - protein, 18 aa, Homo sapiens
MKQKLKYVLQVLGLFLSH

SEQ ID NO: 70945 - protein, 303 aa, Homo sapiens [sequence omitted]

SEQ ID NO: 70946 - protein, 775 aa, Homo sapiens
MVLFNFIIPVSMYVTVEMQKFLGSFFISWDKDFYDEEINEGALVNTSDLNEELGQVDYVFTDKTGTLTENSMEFIECCIDGHKYKGVTQEVDGLSQTDGTLTYFDKVDKNREELFLRALCLCHTVEIKTNDAVDGATESAELTYISSSPDEIALVKGAKRYGFTFLGNRNGYMRVENQRKEIEEYELLHTLNFDAVRRRMSVIVKTQEGDILLFCKGADSAVFPRVQNHEIELTKVHVERNAMDGYRTLCVAFKEIAPDDYERINRQLIEAKMALQDREEKMEKVFDDIETNMNLIGATAVEDKLQDQAAETIEALHAAGLKVWVLTGDKMETAKSTCYACRLFQTNTELLELTTKTIEESERKEDRLHELLIEYRKKLLHEFPKSTRSFKKAWTEHQEYGLIIDGSTLSLILNSSQDSSSNNYKSIFLQICMKCTAVLCCRMAPLQKAQIVRMVKNLKGSPITLSIGDGANDVSMILESHVGIGKEGRQAARNSDYSVPKFKHLKKLLLAHGHLYYVRIAHLVQYFFYKNLCFILPQFLYQFFCGFSQQPLYDAAYLTMYNICFTSLPILAYSLLEQHINIDTLTSDPRLYMKISGNAMLQLGPFLYWTFLAAFEGTVFFFGTYFLFQTASLEENGKVYGNWTFGTIVFTVLVFTVTLKLALDTRFWTWINHFVIWGSLAFYVFFSFFWGGIIWPFLKQQRMYFVFAQMLSSVSTWLAIILLIFISLFPEILLIVLKNVRRRSARVTKRLPSSGTSAIFMLSQTSSNHSFSWSE

SEQ ID NO: 70947 - protein, 22 aa, Homo sapiens
IGLTFLMLGCALEDYGDATTPS

SEQ ID NO: 70948 - protein, 18 aa, Homo sapiens
LTYWLLGLLLHCNFLPWT

SEQ ID NO: 70949 - protein, 48 aa, Homo sapiens
VVFTLGMFSAGLSDLRHMRMTRSVDNVQFLPFLTTEVNVLCSYRLQPC

SEQ ID NO: 70950 - protein, 23 aa, Homo sapiens
IRTGTLALSLVSGAATCPVFPVS

SEQ ID NO: 70951 - protein, 109 aa, Homo sapiens
KRCDLWSLGVVLYIMLSGYPPFVGHCGADCGWDRGEVCRVCQNKLFESIQEGKYEFPDKDWAHISSEAKDLISKLLVRDAKQRLSAAQVLQHPWVQGEQQHNGPDALRS

SEQ ID NO: 70952 - protein, 225 aa, Homo sapiens
IWLPFPVLLLAALPPVLLPGAAGFTPSLDSDFTFTLPAGQKECFYQPMPLKASLEIEYQVLDGAGLDIDFHLASPEGKTLVFEQRKSDGVHTVETEVGDYMFCFDNTFSTISEKVIFFELILDNMGEQAQEQEDWKKYITGTDILDMKLEDILESINSIKSRLSKSGHIQTLLRAFEARDRNIQESNFDRVNFWSMVNLVVMVVVSAIQVYMLKSLFEDKRKSRT

SEQ ID NO: 70953 - protein, 11 aa, Homo sapiens
MLIVYVRFWWL

SEQ ID NO: 70954 - protein, 11 aa, Homo sapiens
MLIVYVRFWWL

SEQ ID NO: 70955 - protein, 40 aa, Homo sapiens
MLGFLGGVSWAMLVARTCQLYPNAAASTLVHKFFLVFSKW

SEQ ID NO: 70956 - protein, 180 aa, Homo sapiens
VILLLFALIQWLAVPDEEEDKTMLAERIPVPSSPVPIATIDLVQQQTEDVMPRIEPRLPPKKTKHQEEQEDVNKPAWGVSSSPWVTFVYALYQIKEMMQLTRDNRASEIQPLQGTNENRENSPAGRAQPVPCETHSDPSRNQPSPDAAASQTQTSPAHPSVDPCTEESEEQQAQLAAGGH

SEQ ID NO: 70957 - protein, 678 aa, Homo sapiens
LLLYFLVLFVLARFFEAIVWYETGIFATQLVDPVALSFKKLKTILECRGLGYSGLPEKKDVRELVEKSGDLMEGELYSALKEEEASESVSSTNFSGEMHFYELVEDTKDGIWLVQVIANDRSPLVGKIHWEKMVKKVSRFGIRTGTFNCSSDPRYCRRRGWVRSTLIMSVPQTSTSKGKVMLKEYSGRKIEVEHIFKWITAHAASRIKTIYNAEHLKEEWNKSDQYWLKIYLFANLDQPPAFFSALSIKFTGRVEFIFVNVENWDNKSYMTDIGIYNMPSYILRTPEGIYRYGNHTGEFISLQAMDSFLRSLQPEVNDLFVLSLVLVNLMAWMDLFITQGATIKRFVVLISTLGTYNSLLIISWLPVLGFLQLPYLDSFYEYSLKLLRYSNTTTLASWVRADWMFYSSHPALFLSTYLGHGLLIDYFEKKRRRNNNNDEVNANNLEWLSSLWDWYTSYLFHPIASFQNFPVESDWDEDPDLFLERLAFPDLWLHPLIPTDYIKNLPMWRFKCLGVQSEEEMSEGSQDTENDSESENTDTLSSEKEVFEDKQSVLHNSPGTASHCDAEACSCANKYCQTSPCERKGRSYGSYNTNEDMEPDWLTWPADMLHCTECVVCLENFENGCLLMGLPCGHVFHQNCIVMWLAGGRHCCPVCRWPSYKKKQPYAQHQPLSNDVPS

SEQ ID NO: 70958 - protein, 278 aa, Homo sapiens
LDGILLPFMLLSQGLGVLRVAWDSRACSPALRALLRKLGGLFLPPEASLSLDSSEGLLARAVVQAVIEQLLVSGQPLLIFLEEPPGALGPRLSALGQAWVGFVVQAVQVGIVPDALLVPVAVTYDLVPDAPCDIDHASAPLGLWTGALAVLRSLWSRWGCSHRICSRVHLAQPFSLQEYIVSARSCWGGRQTLEQLLQPIVLGQCTAVPDTEKEQEWTPITGPLLALKEEDQLLVRRLSCHVLSGEGEPDLGLCGWVTEPSPLGVSQSPGFSIPSVCT

SEQ ID NO: 70959 - protein, 61 aa, Homo sapiens
IYFPPLQKVFQTESLSILDLLFLLGLTSSVCIVAEIIKKVERSREKIQKHVSSTSSSFLEV

SEQ ID NO: 70960 - protein, 1472 aa, Homo sapiens
LWISGILAILRVLISQSTEDIVLSRIQELSFSPYLISCTVINRLRDGDSTSTLEEHSEGKQIKNLPEETFSRFLLQLVGILLEDIVTKQLKVEMSEQQHTFYCQELGTLLMCLIHIFKSGMFRRITAAATRLFRSDGCGGSFYTLDSLNLRARSMITTHPALVLLWCQILLLVNHTDYRWWAEVQQTPKRHSLSSTKLLSPQMSGEEEDSDLAAKLGMCNREIVRRGALILFCDYVCQNLHDSEHLTWLIVNHIQDLISLSHEPPVQDFISAVHRNSAASGLFIQAIQSRCENLSTPTMLKKTLQCLEGIHLSQSGAVLTLYVDRLLCTPFRVLARMVDILACRRVEMLLAANLQSSMAQLPMEELNRIQEYLQSSGLAQRHQRLYSLLDRFRLSTMQDSLSPSPPVSSHPLDGDGHVSLETVSPDKDWYVHLVKSQCWTRSDSALLEGAELVNRIPAEDMNAFMMNSEFNLSLLAPCLSLGMSEISGGQKSALFEAAREVTLARVSGTVQQLPAVHHVFQPELPAEPAAYWSKLNDLFGDAALYQSLPTLARALAQYLVVVSKLPSHLHLPPEKEKDIVKFVVATLEALSWHLIHEQIPLSLDLQAGLDCCCLALQLPGLWSVVSSTEFVTHACSLIYCVHFILEAVAVQPGEQLLSPERRTNTPKAISEEEEEVDPNTQNPKYITAACEMVAEMVESLQSVLALGHKRNSGVPAFLTPLLRNIIISLARLPLVNSYTRVPPLVWKLGWSPKPGGDFGTAFPEIPVEFLQEKEVFKEFIYRINTLGWTSRTQFEETWATLLGVLVTQPLVMEQEESPPEEDTERTQINVLAVQAITSLVLSAMTVPVAGNPAVSCLEQQPRNKPLKALDTRFGRKLSIIRGIVEQEIQAMVSKRENIATHHLYQAWDPVPSLSPATTGALISHEKLLLQINPERELGSMSYKLGQVSIHSVWLGNSITPLREEEWDEEEEEEADAPAPSSPPTSPVNSRKHRAGVDIHSCSQFLLELYSRWILPSSSARRTPAILISEVVRSLLVVSDLFTERNQFELMYVTLTELRRVHPSEDEILAQYLVPATCKAAAVLGMDKAVAEPVSRLLESTLRSSHLPSRVGALHGVLYVLECDLLDDTAKQLIPVISDYLLSNLKGIAHCVNIHSQQHVLVMCATAFYLIENYPLDVGPEFSASIIQMCGVMLSGSEESTPSIIYHCALRGLERLLLSEQLSRLDAESLVKLSVDRVNVHSPHRAMAALGLMLTCMYTGKEKVSPGRTSDPNPAAPDSESVIVAMERVSVLFDRIRKGFPCEARVVARILPQFLDDFFPPQDIMNKVIGEFLSNQQPYPQFMATVVYKVFQTLHSTGQSSMVRDWVMLSLSNFTQRAPVAMATWSLSCFFVSASTSPWVAAILPHVISRMGKLEQVDVNLFCLVATDFYRHQIEEELDRRAFQSVLEVVAAPGSPYHRLLTCLRNVHKVTTC

SEQ ID NO: 70961 - protein, 62 aa, Homo sapiens
IYPFLLMVVVLMAILSFQVRQFKRLYEHIKNDKYLVGQRLVNYERKSGKQGSSPPPPQSSQE

SEQ ID NO: 70962 - protein, 21 aa, Homo sapiens
LLNFHVSLFLVQLLTPCSGRE

SEQ ID NO: 70963 - protein, 514 aa, Homo sapiens
TLLLALGAVLWPAAGAWELTILHTNDVHSRLEQTSEDSSKCVNASRCMGGVARLFTKVQQIRRAEPNVLLLDAGDQYQGTIWFTVYKGAEVAHFMNALRYDAMALGNHEFDNGVEGLIEPLLKEAKFPILSANIKAKGPLASQISGLYLPYKVLPVGDEVVGIVGYTSKETPFLSNPGTNLVFEDEITALQPEVDKLKTLNVNKIIALGHSGFEMDKLIAQKVRGVDVVVGGHSNTFLYTGNPPSKEVPAGKYPFIVTSDDGRKVPVVQAYAFGKYLGYLKIEFDERGNVISSHGNPILLNSSIPEDPSIKADINKWRIKLDNYSTQELGKTIVYLDGSSQSCRFRECNMGNLICDAMINNNLRHTDEMFWNHVSMCILNGGGIRSPIDERNNGIHVVYDLSRKPGDRVVKLDVLCTKCRVPSYDPLKMDEVYKVILPNFLANGGDGFQMIKDELLRHDSGDQDINVVSTYISKMKVIYPAVEGRIKFSTGSHCHGSFSLIFLSLWAVIFVLYQ

SEQ ID NO: 70964 - protein, 14 aa, Homo sapiens
IFCFKLLYFMELWL

SEQ ID NO: 70965 - protein, 53 aa, Homo sapiens
IFYLTLIIFTCKFARLQSIFPDFSKAGMERAFLPVTSPNKHLGLVTPHKTELV

SEQ ID NO: 70966 - protein, 277 aa, Homo sapiens
VLMNRVLALIVAGLSCVLCKQPRHGAPMYRYSFASLSNVLSSWCQYEALKFVSFPTQVLAKASKVIPVMLMGKLVSRRSYEHWEYLTATLISIGVSMFLLSSGPEPRSSPATTLSGLILLAGYIAFDSFTSNWQDALFAYKMSSVQMMFGVNFFSCLFTVGSLLEQGALLEGTRFMGRHSEFAAHALLLSICSACGQLFIFYTIGQFGAAVFTIIMTLRQAFAILLSCLLYGHTVTVVGGLGVAVVFAALLLRVYARGRLKQRGKKAVPVESPVQKV

SEQ ID NO: 70967 - protein, 35 aa, Homo sapiens
MSTKLVVLVLFLFRVETGVLPVWWSPLLQSTLQRK

SEQ ID NO: 70968 - protein, 785 aa, Homo sapiens
INHYFSVRSAKVLALVAVLLLAACHLASRRYRGNDSCEYLLSSGRFLGEKVWQPHSCMMHKYKISEAKNCLVDKHIAFIGDSRIRQLFYSFVKIINPQFKEEGNKHENIPFEDKTASVKVDFLWHPEVNGSMKQCIKVWTEDSIAKPHVIVAGAATWSIKIHNGSSEALSQYKMNITSIAPLLEKLAKTSDVYWVLQDPVYEDLLSENRKMITNEKIDAYNEAAVSILNSSTRNSKSNVKMFSVSKLIAQETIMESLDGLHLPESSRETTAMILMNVYCNKILKPVDGSCCQPRPPVTLIQKLAACFFTLSIIGYLIFYIIHRNAHRKNKPCTDLESGEEKKNIINTPVSSLEILLQSFCKLGLIMAYFYMCDRANLFMKENKFYTHSSFFIPIIYILVLGVFYNENTKETKVLNREQTDEWKGWMQLVILIYHISGASTFLPVYMHIRVLVAAYLFQTGYGHFSYFWIKGDFGIYRVCQVLFRLNFLVVVLCIVMDRPYQFYYFVPLVTVWFMVIYVTLALWPQIIQKKANGNCFWHFGLLLKLGFLLLFICFLAYSQGAFEKIFSLWPLSKCFELKGNVYEWWFRWRLDRYVVFHGMLFAFIYLALQKRQILSEGKGEPLFSNKISNFLLFISVVSFLTYSIWASSCKNKAECNELHPSVSVVQILAFILIRNIPGYARSVYSSFFAWFGKISLELFICQYHIWLAADTRGILVLIPGNPMLNIIVSTFIFVCVAHEISQITNDLAQIIIPKDNSSLLKRLACIAAFFCGLLILSSIQDKSKH

SEQ ID NO: 70969 - protein, 33 aa, Homo sapiens
TYLLLLLKSVVYFAIITCCLLRRTAFCCNGEKS

SEQ ID NO: 70970 - protein, 33 aa, Homo sapiens
MYLLLLLKSVVYFAIITCCLLRRTAFCCNGEKS

SEQ ID NO: 70971 - protein, 276 aa, Homo sapiens
LGVVGLLLVSALSGVLGDRANPDLRAHPGNAAHPGSGATEPRRRPPLKDQRERTRAGSLPLGALYTAAVAAFVLYKCLQGKDETAVLHEEASKQQPLQSEQQLAQLTQQLAQTEQHLNNLMAQLDPLFERVTTLAGAQQELLNMKLWTIHELLQDSKPDKDMEASEPGEGSGGESAGGGDKVSETGTFLISPHTEASRPLPEDFCLKEDEEEIGDSQAWEEPTNWSTETWNLATSWEVGRGLRRRCSQAVAKGPSHSLGWEGGTTAEGRLKQSLFS

SEQ ID NO: 70972 - protein, 107 aa, Homo sapiens
ILCLPLILLLVYKQRQAASNRRAQELVRMDSNIQGIENPGFEASPPAQGIPEAKVRHPLSYVAQRQPSESGRHLLSEPSTPLSPPGPGDVFFPSLDPVPDSPNFEVI

SEQ ID NO: 70973 - protein, 548 aa, Homo sapiens
LGILLLLLPLPVPAPCHTAARSECKRSHKFVPGAWLAGEGVDVTSLRRSGSFPVDTQRFLRPDGTCTLCENALQEGTLQRLPLALTNWRAQGSGCQRHVTRAKVSSTEAVARDAARSIRNDWKVGLDVTPKPTSNVHVSVAGSHSQAANFAAQKTHQDQYSFSTDTVECRFYSFHVVHTPPLHPDFKRALGDLPHHFNASTQPAYLRLISNYGTHFIRAVELGGRISALTALRTCELALEGLTDNEVEDCLTVEAQVNIGIHGSISAEAKACEEKKKKHKMTASFHQTYRERHSEVVGGHHTSINDLLFGIQAGPEQYSAWVNSLPGSPGLVDYTLEPLHVLLDSQDPRREALRRALSQYLTDRARWRDCSRPCPPGRQKSPRDPCQCVCHGSAVTTQDCCPRQRGLAQLEVTFIQAWGLWGDWFTATDAYVKLFFGGQELRTSTVWDNNNPIWSVRLDFGDVLLATGGPLRLQVWDQDSGRDDDLLGTCDQAPKSGSHEVRCNLNHGHLKFRYHARCLPHLGGGTCLDYVPQMLLGEPPGNRSGAVW

SEQ ID NO: 70974 - protein, 33 aa, Homo sapiens
LEAIMNGILLFFCGSELLLEVLTLAAFSSMDRI

SEQ ID NO: 70975 - protein, 23 aa, Homo sapiens
LALYCLLLLLFWIYSSCIEDSHR

SEQ ID NO: 70976 - protein, 11 aa, Homo sapiens
LGVVFSLIFLF

SEQ ID NO: 70977 - protein, 13 aa, Homo sapiens
VASLAGLLFLRFS

SEQ ID NO: 70978 - protein, 49 aa, Homo sapiens
LKMFAASLLAMCAGAEVVHRYYRPDLQNWITSLSVGELEGLGRVEQRRP

SEQ ID NO: 70979 - protein, 39 aa, Homo sapiens
LVPFTLLPLLTMAYLKGDLRRMWSEPFHSKSSSSRFLEV

SEQ ID NO: 70980 - protein, 29 aa, Homo sapiens
ITFGLVFYFATDYLVQPFMDQLAFHQFYI

SEQ ID NO: 70981 - protein, 49 aa, Homo sapiens
VFGFFATIVFATDFYLIFNDVAKFLKQGDSADETTAHKTEEENSDSDSD

SEQ ID NO: 70982 - protein, 76 aa, Homo sapiens
VLGLLLLPILAMLMALCVHCHRLPGSYDSTSSDSLYPRGIQFKRPHTVAPWPPAYPPVTSYPPLSQPDLLPIPHDP

SEQ ID NO: 70983 - protein, 62 aa, Homo sapiens
IFFNVFPAFLPKCVFFFGLLYPASSAVPGIGPSLQKPFQEYLEAQRQKLHHKSEMGTPQVRL

SEQ ID NO: 70984 - protein, 17 aa, Homo sapiens
ILLLLVAIVVVAVWPTN

SEQ ID NO: 70985 - protein, 15 aa, Homo sapiens
IHLEALDLLSALILA

SEQ ID NO: 70986 - protein, 32 aa, Homo sapiens
LWFLYFFFSLYQKVFFNGKKNNFLFSFTNEFQ

SEQ ID NO: 70987 - protein, 48 aa, Homo sapiens
VTIVLALMYVFREHQRSGSYHVREESTYLPLTSMQPTEAMGEEPSRAE

SEQ ID NO: 70988 - protein, 220 aa, Homo sapiens
KDVKAFAGASAGSLVASVLLTAPEKIEECNQFTYKFAEEIRRQSFGAVTPGYDFMARLRSGMESILPPSAHELAQNRLHVSITNAKTRENHLVSTFSSREDLIKVLLASSFVPIYAGLKLVEYKGQKWVDGGLTNALPILPVGRTVTISPFSGRLDISPQDKGQLDLYVNIAKQDIMLSLANLVRLNQALFPPSKRKMESLYQCGFDDTVKFLLKENWFE

SEQ ID NO: 70989 - protein, 167 aa, Homo sapiens [sequence omitted]

SEQ ID NO: 70990 - protein, 60 aa, Homo sapiens
MKFAFGEFHLWYQVALSMVACGKSAYAVSLLRECVKLRPSDPTVPLMAAKVCIGSLRWPP

SEQ ID NO: 70991 - protein, 442 aa, Homo sapiens
MCFLALLFLFSILRKVAWDYGRLALVTDADRLRRQERDRVEQEYVASAMHGDSHDRYERLTSVSSSVDFDQRDNGFCSWLTAIFRIKDDEIRDKCGGDAVHYLSFQRHIIGLLVVVGVLSVGIVLPVNFSGDLLENNAYSFGRTTIANLKSGNNLLWLHTSFAFLYLLLTVYSMRRHTSKMRYKEDDLVKRTLFINGISKYAESEKIKKHFEEAYPNCTVLEARPCYNVARLMFLDAERKKAERGKLYFTNLQSKENVPTMINPKPCGHLCCCVVRGCEQVEAIEYYTKLEQKLKEDYKREKEKVNEKPLGMAFVTFHNETITAIILKDFNVCKCQGCTCRGEPRPSSCSESLHISNWTVSYAPDPQNIYWEHLSIRGFIWWLRCLVINVVLFILLFFLTTPAIIITTMDKFNVTKPVEYLNVRPHAPVTFHAGSQHTDTRP

SEQ ID NO: 70992 - protein, 274 aa, Homo sapiens
MGTWLLACICICTCVCLGVSVTGEGQGPRSRTFTCLTNNILRIDCHWSAPELGQGSSPWLLFTRLLAAHISASCGAVSAPSCCHLRQCSCHLTISPSLSTTACLGGSRSAWWTRSTCPGDTSNISSGHCILTWSISPALEPMTTLLSYELAFKKQEEAWEQAQHRDHIVGVTWLILEAFELDPGFIHEARLRVQMATLEDDVVEEERYTGQWSEWSQPVCFQAPQRQGPLIPPWGWPGNTLVAVSIFLLLTGPTYLLFKLSPRLGWGPTGPVCC

SEQ ID NO: 70993 - protein, 95 aa, Homo sapiens
IAFLGVFLITRNRKKPIPFEPYISMDAMPGMQNMHDKGMTVQPELKASFSYGALENNDNISEIYAPATLPVMQEEHGSRSASGVPYRVLEHTKKE

SEQ ID NO: 70994 - protein, 801 aa, Homo sapiens
RNILQTMVQLLGALTGCVQHICATQESIILENIQSLPSSVLHIIKSTFVHCKNSESVYSGCLHLVSDLLQALFKEAYSLQKQLMELLDMVCMDPLVDDNDDILNMVIVIHSLLDICSVISSMDHAFHANTWKFIIKQSLKHQSIIKSQLKHKDIITSLCEDILFSFHSCLQLAEQMTQSDAQDNADYRLFQKTLKLCRFFANSLLHYAKEFLPFLSDSCCTLHQLYLQIHSKFPPSLYATRISKAHQEEIAGAFLVTLDPLISQLLTFQPFMQVVLDSKLDLPCELQFPQCLLLVVVMDKLPSQPKEVQTLWCTDSQVSETTTRISLLKAVFYSFEQCSGELSLPVHLQGLKSKGKAEVAVTLYQHVCVHLCTFITSFHPSLFAELDAALLNAVLSANMITSLLAMDAWCFLARYGTAELCAHHVTIVAHLIKSCPGECYQLINLSILLKRLFFFMAPPHQLEFIQKFSPKEAENLPLWQHISFQALPPELREQTVHEVTTVGTAECRKWLSRSRTLGELESLNTVLSALLAVCNSAGEALDTGKQTAIIEVVSQLWAFLNIKQVADQPYVQQTFSLLLPLLGFFIQTLDPKLILQAVTLQTSLLKLELPDYVRLAMLDFVSSLGKLFIPEAIQDRILPNLSCMFALLLADRSWLLEQHTLEAFTQFAEGTNHEEIVPQCLSSEETKNKVVSFLEKTGFVDETEAAKVERVKQEKGIFWEPFANVTVEEAKRSSLQPYAKRARQEFPWEEEYRSALHTIAGALEATESLLQKGPAPAWLSMEMEALQERMDKLKRYIHTLG

SEQ ID NO: 70995 - protein, 50 aa, Homo sapiens
LILLTFLIVITLYVISKHRARNYYTDTSQKEAFHLEAREVYSVDPYNPAS

SEQ ID NO: 70996 - protein, 44 aa, Homo sapiens
VTIVLLHMLLSVGCLAYFFDAPEMDHLPTTTATPNQTVAAAKSS

SEQ ID NO: 70997 - protein, 846 aa, Homo sapiens
VIAIFALMSSCLATAGPEPGALCELSPVSASHPVQALMESFTVLSGCASRGTTGLPQEVHVLNLRTAGQGPGQLQREVTLHLNPISSVHIHHKSVVFLLNSPHPLVWHLKTERLATGVSRLFLVSEGSVVQFSSANFSLTAETEERNFPHGNEHLLNWARKEYGAVTSFTELKIARNIYIKVGEDQVFPPKCNIGKNFLSLNYLAEYLQPKAAEGCVMSSQPQNEEVHIIELITPNSNPYSAFQVDITIDIRPSQEDLEVVKNLILILKCKKSVNWVIKSFDVKGSLKIIAPNSIGFGKESERSMTMTKSIRDDIPSTQGNLVKWALDNGYSPITSYTMAPVANRFHLRLENNAEEMGDEEVHTIPPELRILLDPGALPALQNPPIRGGEGQNGGLPFPFPDISRRVWNEEGEDGLPRPKDPVIPSIQLFPGLREPEEVQGSVDIALSVKCDNEKMIVAVEKDSFQASGYSGMDVTLLDPTCKAKMNGTHFVLESPLNGCGTRPRWSALDGVVYYNSIVIQVPALGDSSGWPDGYEDLESGDNGFPGDMDEGDASLFTRPEIVVFNCSLQQVRNPSSFQEQPHGNITFNMELYNTDLFLVPSQGVFSVPENGHVYVEVSVTKAEQELGFAIQTCFISPYSNPDRMSHYTIIENICPKDESVKFYSPKRVHFPIPQADMDKKRFSFVFKPVFNTSLLFLQCELTLCTKMEKHPQKLPKCVPPDEACTSLDASIIWAMMQNKKTFTKPLAVIHHEAESKEKGPSMKEPNPISPPIFHGLDTLTVMGIAFAAFVIGALLTGALWYIYSHTGETAGRQQVPTSPPASENSSAAHSIGSTQSTPCSSSSTA

SEQ ID NO: 70998 - protein, 16 aa, Homo sapiens
ITVAFLDWALALISQQ

SEQ ID NO: 70999 - protein, 60 aa, Homo sapiens
ILKDNWSPALTISKVLLSICSLLTDCNPADPLVGSIATQYLTNRAEHDRIARQWTKRYAT

SEQ ID NO: 71000 - protein, 607 aa, Homo sapiens
IFFFIIVLVLMQREVSVQYSKEESRMERNMKNKNKMLDLMLEAVNNIKDAMPKMQIGAPVRQNIDAGERPCLQGYYTAAELKPVLDRPPQDSNAPGASGKAFKTTNLSVEEQKEKERGEAKHCFNAFASDRISLHRDLGPDTRPPECIEQKFKRCPPLPTTSVIIVFHNEAWSTLLRTVHSVLYSSPAILLKEIILVDDASVDEYLHDKLDEYVKQFSIVKIVRQRERKGLITARLLGATVATAETLTFLDAHCECFYGWLEPLLARIAENYTAVVSPDIASIDLNTFEFNKPSPYGSNHNRGNFDWSLSFGWESLPDHEKQRRKDETYPIKTPTFAGGLFSISKEYFEYIGSYDEEMEIWGGENIEMSFRVWQCGGQLEIMPCSVVGHVFRSKSPHSFPKGTQVIARNQVRLAEVWMDEYKEIFYRRNTDAAKIVKQKAFGDLSKRFEIKHRLQCKNFTWYLNNIYPEVYVPDLNPVISGYIKSVGQPLCLDVGENNQGGKPLIMYTCHGLGGNQYFEYSAQHEIRHNIQKELCLHAAQGLVQLKACTYKGHKTVVTGEQIWEIQKDQLLYNPFLKMCLSANGEHPSLVSCNPSDPLQKWILSQND

SEQ ID NO: 71001 - protein, 20 aa, Homo sapiens
IVHLMGCIFGFFLLSFKERL

SEQ ID NO: 71002 - protein, 10 aa, Homo sapiens
MYFWLFFVVV

SEQ ID NO: 71003 - protein, 163 aa, Homo sapiens
VGGLNLLAAGAMAGVPAASLVTPADVIKTRLQVAARAGQTTYSGVIDCFRKILREEGPSAFWKGTAARVFRSSPQFGVTLVTYELLQRWFYIDFGGLKPAGSEPTPKSRIADLPPANPDHIGGYRLATATFAGIENKFGLYLPKFKSPSVAVVQPKAAVAATQ

SEQ ID NO: 71004 - protein, 19 aa, Homo sapiens
ICVFILLLVFIVVKCFTSE

SEQ ID NO: 71005 - protein, 34 aa, Homo sapiens
RNLWQILFHIGVAFLSSYQILTRQLQEKQSDCGV

SEQ ID NO: 71006 - protein, 11 aa, Homo sapiens
IKPFILFSGIM

SEQ ID NO: 71007 - protein, 72 aa, Homo sapiens
LRVRILLHGSALLYAAGWSPEKQAQHLPLRVTELVQQLTGQAPAPGQRVLVLELSCEGDDEDTAFPPLHYEL

SEQ ID NO: 71008 - protein, 448 aa, Homo sapiens
LGIYLQLFFLSIVSQPTFINSVLPISAALPSLDQKKRGGHKACCLLTPPPPPLFPPPFFRGGRSPLLSPDMKNLMLELETSQSPCMQGSLGSPGPPGPQGPPGLPGKTGPKGEKGELGRPGRKGRPGPPGVPGMPGPIGWPGPEGPRGEKGDLGMMGLPGSRGPMGSKGYPGSRGEKGSRGEKGDLGPKGEKGFPGFPGMLGQKGEMGPKGEPGIAGHRGPTGRPGKRGKQGQKGDSGVMGPPGKPGPSGQPGRPGPPGPPPAGQLIMGPKGERGFPGPPGRCLCGPTMNVNNPSYGESVYGPSSPRVPVIFVVNNQEELERLNTQNAIAFRRDQRSLYFKDSLGWLPIQLTPFYPVDYTADQHGTCGDGLLQPGEECDDGNSDVGDDCIRDCHRAYCGDGHRHEGVEDCDGSDFGYLTCETYLPGSYGDLQCTQYCYIDSTPCRYFT

SEQ ID NO: 71009 - protein, 144 aa, Homo sapiens
LNDTSVVHPVLWLLLGSWSLTTALRQRSALALQHRPVVLFGDLAGTAPKLPGPQQQEAVTLPPNLHLQILSIPGWRYSSNHTEHSQNLRKGHRGEAQADLRRVLLRLYHLYEVGEDPVLSQPVTVNLEVNFPTPIQTISQGSKP

SEQ ID NO: 71010 - protein, 16 aa, Homo sapiens
ILVSWLLLLELSLLPR

SEQ ID NO: 71011 - protein, 587 aa, Homo sapiens
LLCMLLVLGTAIVEAHDGHDDDVIDIEDDLDDVIEEVEDSKPDTTAPPSSPKVTYKAPVPTGEVYFADSFDRGTLSGWILSKAKKDDTDDEIAKYDGKWEVEEMKESKLPGDKGLVLMSRAKHHAISAKLNKPFLFDTKPLIVQYEVNFQNGIECGGAYVKLLSKTPELNLDQFHDKTPYTIMFGPDKCGEDYKLHFIFRHKNPKTGIYEEKHAKRPDADLKTYFTDKKTHLYTLILNPDNSFEILVDQSVVNSGNLLNDMTPPVNPSREIEDPEDRKPEDWDERPKIPDPEAVKPDDWDEDAPAKIPDEEATKPEGWLDDEPEYVPDPDAEKPEDWDEDMDGEWEAPQIANPRCESAPGCGVWQRPVIDNPNYKGKWKPPMIDNPSYQGIWKPRKIPNPDFFEDLEPFRMTPFSAIGLELWSMTSDIFFDNFIICADRRIVDDWANDGWGLKKAADGAAEPGVVGQMIEAAEERPWLWVVYILTVALPVFLVILFCCSGKKQTSGMEYKKTDAPQPDVKEEEEEKEEEKDKGDEEEEGEEKLEEKQKSDAEEDGGTVSQEEEDRKPKAEEDEILNRSPRNRKPRRE

SEQ ID NO: 71012 - protein, 178 aa, Homo sapiens
KALSIILHLICLLEKVPCTLEQDHFKKQTIYRFLKLHPRGKNNFSPLHLAVDKNTTCVGRYPVCKFPSLQVTAILIECGADVNVRDSDDNSPLHIAALNNHPDIMNLLIKSGAHFDATNLHKQTASDLLDEKEIAKNLIQPINHTTLQCLAARVIVNHRIYYKGHIPEKLETFVSLHR

SEQ ID NO: 71013 - protein, 538 aa, Homo sapiens
LLLFCLCAFLSLSWYAALSGQKGDVVDVYQREFLALRDRLHAAEQESLKRSKELNLVLDEIKRAVSERQALRDGDGNRTWGRLTEDPRLKPWNGSHRHVLHLPTVFHHLPHLLAKESSLQPAVRVGQGRTGVSVVMGIPSVRREVHSYLTDTLHSLISELSPQEKEDSVIVVLIAETDSQYTSAVTENIKALFPTEIHSGLLEVISPSPHFYPDFSRLRESFGDPKERVRWRTKQNLDYCFLMMYAQSKGIYYVQLEDDIVAKPNYLSTMKNFALQQPSEDWMILEFSQLGFIGKMFKSLDLSLIVEFILMFYRDKPIDWLLDHILWVKVCNPEKDAKHCDRQKANLRIRFKPSLFQHVGTHSSLAGKIQKLKDKDFGKQALRKEHVNPPAEVSTSLKTYQHFTLEKAYLREDFFWAFTPAAGDFIRFRFFQPLRLERFFFRSGNIEHPEDKLFNTSVEVLPFDNPQSDKEALQEGRTATLRYPRSPDGYLQIGSFYKGVAEGEVDPAFGPLEALRLSIQTDSPVWVILSEIFLKKAD

SEQ ID NO: 71014 - protein, 1533 aa, Homo sapiens
TIARCWYILLSGSVLVKGSMVLPPCSFGKQFGGKRGCDCLVLEPSEMIVVENAKDNEDSILQREIPARQSRRRFRKINYKGERQTITDDVEVNSYLSLPADLTKMHLTENPHPQVTHVSSSQSGCSIASDSGSSSLSDIYQATESEVGDVDLTRLPEGPVDSEDDEEEDEEIDRTDPLQGRDLVRECLEKEPADKTDDDIEQLLEFMHQLPAFANMTMSVRRELCSVMIFEVVEQAGAIILEDGQELDSWYVILNGTVEISHPDGKVENLFMGNSFGITPTLDKQYMHGIVRTKVDDCQFVCIAQQDYWRILNHVEKNTHKVEEEGEIVMVHEHRELDRSGTRKGHIVIKATPERLIMHLIEEHSIVDPTYIEDFLLTYRTFLESPLDVGIKLLEWFKIDSLRDKVTRIVLLWVNNHFNDFEGDPAMTRFLEEFEKNLEDTKMNGHLRLLNIACAAKAKWRQVVLQKASRESPLQFSLNGGSEKGFGIFVEGVEPGSKAADSGLKRGDQIMEVNGQNFENITFMKAVEILRNNTHLALTVKTNIFVFKELLFRTEQEKSGVPHIPKIAEKKSNRHSIQHVPGDIEQTSQEKGSKKVKANTVSGGRNKIRKILDKTRFSILPPKLFSDGGLSQSQDDSIVGTRHCRHSLAIMPIPGTLSSSSPDLLQPTTSMLDFSNPSDIPDQVIRVFKVDQQSCYIIISKDTTAKEVVFHAVHEFGLTGASDTYSLCEVSVTPEGVIKQRRLPDQFSKLADRIQLNGRYYLKNNMETETLCSDEDAQELVKESQLSMLQLSTIEVATQLSMRDFDLFRNIEPTEYIDDLFKLNSKTGNTHLKRFEDIVNQETFWVASEILTEANQLKRMKIIKHFIKIALHCRECKNFNSMFAIISGLNLASVARLRGTWEKLPSKYEKHLQDLQDIFDPSRNMAKYRNILSSQSMQPPIIPLFPVVKKDMTFLHEGNDSKVDGLVNFEKLRMISKEIRQVVRMTSANMDPAMMFRQRSLSQGSTNSNMLDVQGGAHKKRARRSSLLNAKKLYEDAQMARKVKQYLSSLDVETDEEKFQMMSLQWEPAYGTLTKNLSEKRSAKSSEMSPVPMRSAGQTTKAHLHQPHRVSQVLQVPAVNLHPIRKKGQTKDPALNTSLPQKVLGTTEEISGKKHTEDTISVASSLHSSPPASPQGSPHKGYTLIPSAKSDNLSDSSHSEISSRSSIVSNCSVDSMSAALQDERCSSQALAVPESTGALEKTEHASGIGDHSQHGPGWTLLKPSLIKCLAVSSSVSNEEISQEHIIIEAADSGRGSWTSCSSSSHDNFQSLPNPKSWDFLNSYRHTHLDDPIAEVEPTDSEPYSCSKSCSRTCGQCKGSLERKSWTSSSSLSDTYEPNYGTVKQRVLESTPAESSEGLDPKDATDPVYKTVTSSTEKGLIVYCVTSPKKDDRYREPPPTPPGYLGISLADLKEGPHTHLKPPDYSVAVQRSKMMHNSLSRLPPASLSSNLVACVPSKIVTQPQRHNLQPFHPKLGDVTDADSEADENEQVSAV

SEQ ID NO: 71015 - protein, 1428 aa, Homo sapiens
LKSGGTSLSFLVLVTGCTSVGRIPDAEIYKITATDFYPLQEEAKEEERLIALKKILSSGVFYFSWPNDGSRFDLTVRTQKQGDDSSEWGNSFFWNQLLHVPLRQHQVSCCDWLLKIICGVVTIRTVYASHKQAKACLVSRVSCERTGTRFHTRGVNDDGHVSNFVETEQMIYMDDGVSSFVQIRGSVPLFWEQPGLQVGSHHLRLHRGLEANAPAFDRHMVLLKEQYGQQVVVNLLGSRGGEEVLNRAFKKLLWASCHAGDTPMINFDFHQFAKGGKLEKLETLLRPQLKLHWEDFDVFTKGENVSPRFQKGTLRMNCLDCLDRTNTVQSFIALEVLHLQLKTLGLSSKPIVDRFVESFKAMWSLNGHSLSKVFTGSRALEGKAKVGKLKDGARSMSRTIQSNFFDGVKQEAIKLLLVGDVYGEEVADKGGMLLDSTALLVTPRILKAMTERQSEFTNFKRIRIAMGTWNVNGGKQFRSNVLRTAELTDWLLDSPQLSGATDSQDDSSPADIFAVGFEEMVELSAGNIVNASTTNKKMWGEQLQKAISRSHRYILLTSAQLVGVCLYIFVRPYHVPFIRDVAIDTVKTGMGGKAGNKGAVGIRFQFHSTSFCFICSHLTAGQSQVKERNEDYKEITQKLCFPMGRNVFSHDYVFWCGDFNYRIDLTYEEVFYFVKRQDWKKLLEFDQLQLQKSSGKIFKDFHEGAINFGPTYKYDVGSAAYDTSDKCRTPAWTDRVLWWRKKHPFDKTAGELNLLDSDLDVDTKVRHTWSPGALQYYGRAELQASDHRPVLAIVEVEVQEVDVGARERVFQEVSSFQGPLDATVVVNLQSPTLEEKNEFPEDLRTELMQTLGSYGTIVLVRINQGQMLVTFADSHSALSVLDVDGMKVKGRAVKIRPKTKDWLKGLREEIIRKRDSMAPVSPTANSCLLEENFDFTSLDYESEGDILEDDEDYLVDEFNQPGVSDSELGGDDLSDVPGPTALAPPSKSPALTKKKQHPTYKDDADLVELKRELEAVGEFRHRSPSRSLSVPNRPRPPQPPQRPPPPTGLMVKKSASDASISSGTHGQYSILQTARLLPGAPQQPPKARTGISKPYNVKQIKTTNAQEAEAAIRCLLEARGGASEEALSAVAPRDLEASSEPEPTPGAAKPETPQAPPLLPRRPPPRVPAIKKPTLRRTGKPLSPEEQFEQQTVHFTIGPPETSVEAPPVVTAPRVPPVPKPRTFQPGKAAERPSHRKPASDEAPPGAGASVPPPLEAPPLVPKVPPRRKKSAPAAFHLQVLQSNSQLLQGLTYNSSDSPSGHPPAAGTVFPQGDFLSTSSATSPDSDGTKAMKPEAAPLLGDYQDPFWNLLHHPKLLNNTWLSKSSDPLDSGTRSPKRDPIDPVSAGASAAKAELPPDHEHKTLGHWVTISDQEKRTALQVFDPLAKT

SEQ ID NO: 71016 - protein, 452 aa, Homo sapiens
KLLVILLFSGLITGFRSDSSSSLPPKLLLVSFDGFRADYLKNYEFPHLQNFIKEGVLVEHVKNVFITKTFPNHYSIVTGLYEESHGIVANSMYDAVTKKHFSDSNDKDPFWWNEAVPIWVTNQLQENRSSAAAMWPGTDVPIHDTISSYFMNYNSSVSFEERLNNITMWLNNSNPPVTFATLYWEEPDASGHKYGPEDKENMSRVLKKIDDLIGDLVQRLKMLGLWENLNVIITSDHGMTQCSQDRLINLDSCIDHSYYTLIDLSPVAAILPKINRTEVYNKLKNCSPHMNVYLKEDIPNRFYYQHNDRIQPIILVADEGWTIVLNESSQKLGDHGYDNSLPSMHPFLAAHGPAFHKGYKHSTINIVDIYPMMCHILGLKPHPNNGTFGHTKCLLVDQWCINLPEAIAIVIGSLLVLTMLTCLIIIMQNRLSVPRPFSRLQLQEDDDDPLIG

SEQ ID NO: 71017 - protein, 21 aa, Homo sapiens
VLVVLGVVLLGQFVVRRFFKS

SEQ ID NO: 71018 - protein, 44 aa, Homo sapiens
IAGELYGPLMLVFTLVAILLHGMKTSDTIIVSRTDNFGGVAALG

SEQ ID NO: 71019 - protein, 59 aa, Homo sapiens
ISFIFLFLNFYIRTYKEPKKPKAGKTAMNGISANGVSKSEKQLMIENGKKQKNGKAKGD

SEQ ID NO: 71020 - protein, 56 aa, Homo sapiens
IVAGLAVLVVLAVLGAVVTAMMCRRKSSGGKGGSCSQAACSNSAQGSDESLITCKA

SEQ ID NO: 71021 - protein, 521 aa, Homo sapiens
LLLFLLGYGWAAACAGARKKRRSPPRKREEAAAVPAAAPDDLALLKNLRSEEQKKKNRKKLSEKPKPNGRTVEVAEGEAVRTPQSVTAKQPPEIDKKNEKSKKNKKKSKSDAKAVQNSSRHDGKEVDEGAWETKISHREKRQQRKRDKVLTDSGSLDSTIPGIENTITVTTEQLTTASFPVGSKKNKGDSHLNVQVSNFKSGKGDSTLQVSSGLNENLTVNGGGWNEKSVKLSSQISAGEEKWNSVSPASAGKRKTEPSAWSQDTGDANTNGKDWGRSWSDRSIFSGIGSTAEPVSQSTTSDYQWDVSRNQPYIDDEWSGLNGLSSADPNSDWNAPAEEWGNWVDEERASLLKSQEPIPDDQKVSDDDKEKGEGALPTGKSKKKKKKKKKQGEDNSTAQDTEELEKEIREDLPVNTSKTRPKQEKAFSLKTISTSDPAEVLVKNSQPIKTLPPATSTEPSVILSKSDSDKSSSQVPPILQETDKSKSNTKQNSVPPSQTKSETSWESPKQIKKKKKARRET

SEQ ID NO: 71022 - protein, 703 aa, Homo sapiens
TWFMVIALLGVWTSVAVVWFDLVDYEEVLGKLGIYDADGDGDFDVDDAKVLLGLKERSTSEPAVPPEEAEPHTEPEEQVPVEAEPQNIEDEAKEQIQSLLHEMVHAEHVEGEDLQQEDGPTGEPQQEDDEFLMATDVDDRFETLEPEVSHEETEHSYHVEETVSQDCNQDMEEMMSEQENPDSSEPVVEDERLHHDTDDVTYQVYEEQAVYEPLENEGIEITEVTAPPEDNPVEDSQVIVEEVSIFPVEEQQEVPPETNRKTDDPEQKAKVKKKKPKLLNKFDKTIKAELDAAEKLRKRGKIEEAVNAFKELVRKYPQSPRARYGKAQCEDDLAEKRRSNEVLRGAIETYQEVASLPDVPADLLKLSLKRRSDRQQFLGHMRGSLLTLQRLVQLFPNDTSLKNDLGVGYLLIGDNDNAKKVYEEVLSVTPNDGFAKVHYGFILKAQNKIAESIPYLKEGIESGDPGTDDGRFYFHLGDAMQRVGNKEAYKWYELGHKRGHFASVWQRSLYNVNGLKAQPWWTPKETGYTELVKSLERNWKLIRDEGLAVMDKAKGLFLPEDENLREKGDWSQFTLWQQGRRNENACKGAPKTCTLLEKFPETTGCRRGQIKYSIMHPGTHVWPHTGPTNCRLRMHLGLVIPKEGCKIRCANETKTWEEGKVLIFDDSFEHEVWQDASSFRLIFIVDVWHPELTPQQRRSLPAI

SEQ ID NO: 71023 - protein, 28 aa, Homo sapiens
VTIGCILGMFPLIFFGGGEEDEKLETKS

SEQ ID NO: 71024 - protein, 9 aa, Homo sapiens
LLACSLLLA

SEQ ID NO: 71025 - protein, 18 aa, Homo sapiens
LVLLSLGCFFSVAETLHR

SEQ ID NO: 71026 - protein, 8 aa, Homo sapiens
IWSILLVM

SEQ ID NO: 71027 - protein, 187 aa, Homo sapiens
IFQNPKKLHLTIGMLVLLSEEEIQQTCEMLQQCKEEFINDISGGKPLEVEMAGIEYMNDDPGMVDVLYAKVHMKDGSNRLQELVDRVLERFQASGLIVKEWNSVKLHATVMNTLFRKDPNAEGRYNLYTAEGKYIFKERESFDGRNILKLFENFYFGSLKLNSIHISQRFTVDSFGNYASCGQIDFS

SEQ ID NO: 71028 - protein, 66 aa, Homo sapiens
LLVIAVAIATVIVISLVMLRKRQYGTISHGIVEVDPMLTPEERHLNKMQNHGYENPTYKYLEQMQI

SEQ ID NO: 71029 - protein, 307 aa, Homo sapiens
IAGLIGVTCVFPIDLAKTRLQNQQNGQRVYTSMSDCLIKTVRSEGYFGMYRGAAVNLTLVTPEKAIKLAANDFFRHQLSKDGQKLTLLKEMLAGCGAGTCQVIVTTPMEMLKIQLQDAGRIAAQRKILAAQGQLSAQGGAQPSVEAPAAPRPTATQLTRDLLRSRGIAGLYKGLGATLLRDVPFSVVYFPLFANLNQLGRPASEEKSPFYVSFLAGCVAGSAAAVAVNPCDVVKTRLQSLQRGVNEDTYSGILDCARKILRHEGPSAFLKGAYCRALVIAPLFGIAQVVYFLGIAESLLGLLQDPQA

SEQ ID NO: 71030 - protein, 47 aa, Homo sapiens
LASLLVLLALLLAALLYVKCRLNVLLWYQDAYGEVEINATAPRTASS

SEQ ID NO: 71031 - protein, 35 aa, Homo sapiens
VAFGLLVLYILLASSWKRPEPGILTDRQPLLHDGE

SEQ ID NO: 71032 - protein, 303 aa, Homo sapiens
IAGLLYALVQLGQPCDCLPPLRAAAEQLRQKDLRISQLQAELRRPPPAPAQPPEPEALPTIYVVTPTYARLVQKAELVRLSQTLSLVPRLHWLLVEDAEGPTPLVSGLLAASGLLFTHLVVLTPKAQRLREGEPGWVHPRGVEQRNKALDWLRGRGGAVGGEKDPPPPGTQGVVYFADDDNTYSRELFEEMRWTRGVSVWPVGLVGGLRFEGPQVQDGRVVGFHTAWEPSRPFPVDMAGFAVALPLLLDKPNAQFDSTAPRGHLESSLLSHLVDPKDLEPRAANCTRSLAVSPRLECSSAILA

SEQ ID NO: 71033 - protein, 12 aa, Homo sapiens
LLNFFILNFQIL

SEQ ID NO: 71034 - protein, 560 aa, Homo sapiens
IIFSYVCFALVSDKLYQRKEPVISSVHTKVKGIAEVKEEIVENGVKKLVHSVFDTADYTFPLQGNSFFVMTNFLKTEGQEQRLCPEYPTRRTLCSSDRGCKKGWMDPQSKGIQTGRCVVYEGNQKTCEVSAWCPIEAVEEAPRPALLNSAENFTVLIKNNIDFPGHNYTTRNILPGLNITCTFHKTQNPQCPIFRLGDIFRETGDNFSDVAIQGGIMGIEIYWDCNLDRWFHHCRPKYSFRRLDDKTTNVSLYPGYNFRYAKYYKENNVEKRTLIKVFGIRFDILVFGTGGKFDIIQLVVYIGSTLSYFGLAAVFIDFLIDTYSSNCCRSHIYPWCKCCQPCVVNEYYYRKKCESIVEPKPTLKYVSFVDESHIRMVNQQLLGRSLQDVKGQEVPRPAMDFTDLSRLPLALHDTPPIPGQPEEIQLLRKEATPRSRDSPVWCQCGSCLPSQLPESHRCLEELCCRKKPGACITTSELFRKLVLSRHVLQFLLLYQEPLLALDVDSTNSRLRHCAYRCYATWRFGSQDMADFAILPSCCRWRIRKEFPKSEGQYSGFKSPY

SEQ ID NO: 71035 - protein, 9 aa, Homo sapiens
LKTALLIAL

SEQ ID NO: 71036 - protein, 485 aa, Homo sapiens
IPRLSKVNLFTLLSLWMELFPAEAQRQKSQKNEEGKHGPLGDNEERTRVSTDKRQVKRTGLVVVKNMKIVGLHCSSEDLHAGQIALIKHGSRLKNCDLYFSRKPCSACLKMIVNAGVNRISYWPADPEISLLTEASSSEDAKLDAKAVERLKSNSRAHVCVLLQPLVCYMVQFVEETSYKCDFIQKITKTLPDANTDFYYECKQERIKEYEMLFLVSNEEMHKQILMTIGLENLCENPYFSNLRQNMKDLILLLATVASSVPNFKHFGFYRSNPEQINEIHNQSLPQEIARHCMVQARLLAYRTEDHKTGVGAVIWAEGKSRSCDGTGAMYFVGCGYNAFPVGSEYADFPHMDDKQKDREIRKFRYIIHAEQNALTFRCQEIKPEERSMIFVTKCPCDECVPLIKGAGIKQIYAGDVDVGKKKADISYMRFGELEGVSKFTWQLNPSGAYGLEQNEPERRENGVLRPVPQKEEQHQDKKLRLGIH

SEQ ID NO: 71037 - protein, 21 aa, Homo sapiens
MKKKMMMMNKLVLAQFFFSCL

SEQ ID NO: 71038 - protein, 295 aa, Homo sapiens
IRVGALYLLYGLYNTQLCQPKQKIRVALKDWDEVLKFQQDLVNAQHFDAAYIFRKLRLDRAFHFTAMPKLLSYRMKKKIHRAEVTEEFKDPSDRVMKLITSDVLEEMLNVHDHYQNMKHVISVDKSKPDKALSLIKDDFFDNIKNIVLEHQQWHKDRKNPSLKSKTNDGEEKMEGNSQETERCERAESLAKIKSKAFSVVIQASKSRRHRQVKLDSSDSDSASGQGQVKATRKKEKKERLKPAGRKMSLRNKGNVQNIHKEDKPLSLSMPVITEEEENESLSGTEFTASKKRRKH

SEQ ID NO: 71039 - protein, 191 aa, Homo sapiens
LEPENKWCLLTIILLMRALDPLLYEKETLQYFQTLKAVDPMRATYLDDLRSKFLLENSVLKMEYAEVRVLHLAHKDLTVLCHLEQLLLVTHLDLSHNRLRTLPPALAALRCLEVLQASDNAIESLDGVTNLPRLQELLLCNNRLQQPAVLQPLASCPRLVLLNLQGNPLCQAVGILEQLAELLPSVSSVLT

SEQ ID NO: 71040 - protein, 819 aa, Homo sapiens
IGGITVSVVAFFFTIKFLFELAARVVSFLQNEDRERRGDRTIYDYVRGNYLDPRSCKVSWDWKDPYEVGHSMAFRVHLFYKNGQPFPAHRPVGLRVHISHVELAVEIPVTQEVLQEPNSNVVKVAFTVRKAGRYEITVKLGGLNVAYSPYYKIFQPGMVVPSKTKIVCHFSTLVLTCGQPHTLQIVPRDEYDNPTNNSMSLRDEHNYTLSIHELGPQEEESTGVSFEKSVTSNRQTFQVFLRLTLHSRGCFHACISYQNQPINNGEFDIIVLSEDEKNIVERNVSTSGVSIYFEAYLYNATNCSSTPWHLPPMHMTSSQRRPSTAVDEEDEDSPSECHTPEKVKKPKKVYCYVSPKQFSVKEFYLKIIPWRLYTFRVCPGTKFSYLGPDPVHKLLTLVVDDGIQPPVELSCKERNILAATFIRSLHKNIGGSETFQDKVNFFQRELRQVHMKRPHSKVTLKVSRHALLESSLKATRNFSISDWSKNFEVVFQDEEALDWGGPRREWFELICKALFDTTNQLFTRFSDNNQALVHPNPNRPAHLRLKMYEFAGRLVGKCLYESSLGGAYKQLVRARFTRSFLAQIIGLRMHYKYFETDDPEFYKSKVCFILNNDMSEMELVFAEEKYNKSGQLDKVVELMTGGAQTPVTNANKIFYLNLLAQYRLASQVKEEVEHFLKGLNELVPENLLAIFDENELELLMCGTGDISVSDFKAHAVVVGGSWHFREKVMRWFWTVVSSLTQEELARLLQFTTGSSQLPPGGFAALCPSFQIIAAPTHSTLPTAHTCFNQLCLPTYDSYEEVHRMLQLAISEGCEGFGML

SEQ ID NO: 71041 - protein, 413 aa, Homo sapiens
IVIVGGGIVGLASARALILRHPSLSIGVLEKEKDLAVHQTGHNSGVIHSGIYYKPESLKAKLCVQGAALLYEYCQQKGISYKQCGKLIVAVEQEEIPRLQALYEKGLQNGVPGLRLIQQEDIKKKEPYCRGLMAIDCPHTGIVDYRQVALSFAQDFQEAGGSVLTNFEVKGIEMAKESPSRSIDGMQYPIVIKNTKGEEIRCQYVVTCAGLYSDRISELSGCTPDPRIVPFRGDYLLLKPEKCYLVKGNIYPVPDSRFPFLGVHFTPRMDGSIWLGPNAVLAFKREGYRPFDFSATDVMDIIINSGLIKLASQNFSYGVTEMYKACFLGATVKYLQKFIPEITISDILRGPAGVRAQALDRDGNLVEDFVFDAGVGDIGNRILHVRNAPSPAATSSIAISGMIADEVQQRFEL

SEQ ID NO: 71042 - protein, 26 aa, Homo sapiens
VWWQILLFLHNLALNGEENRNGAGPR

SEQ ID NO: 71043 - protein, 35 aa, Homo sapiens
MVVIFVIAVFTVALGGYWSGLVELENLKAVTTEDR

SEQ ID NO: 71044 - protein, 128 aa, Homo sapiens
KHPVLCLFCGAILCSQNICCQEIVNGEEVGACIFHALHCGAGVCIFLKIRECRVVLVEGKARGCAYPAPYLDEYGETDPGLKRGNPLHLSRERYRKLHLVWQQHCIIEEIARSQETNQMLFGFNWQLL

SEQ ID NO: 71045 - protein, 243 aa, Homo sapiens
VLPLRGLRALCRVLLFLSQFCILSGGEQSQALAQSIKDPGPTRTFTVVPRAAESTEIPPYVMKCPSNGLCSRLPADCIDCTTNFSCTYGKPVTFDCAVKPSVTCVDQDFKSQKNFIINMTCRFCWQLPETDYECTNSTSCMTVSCPRQRYPANCTVRDHVHCLGNRTFPKMLYCNWTGGYKWSTALALSITLGGFGADRFYLGQWREGLGKLFSFGGLGIWTLIDVLLIGVGYVGPADGSLYI

SEQ ID NO: 71046 - protein, 52 aa, Homo sapiens
IGLMNFVLGFFCCFMGCDLGCCLIPCLINDFKDVTHTCPSCKAYIYTYKRLC

SEQ ID NO: 71047 - protein, 68 aa, Homo sapiens
IYLVFLIILYEGLLGGAAYVNTFHNIALETSDEHREFAMAATCISDTLGISLSGLLALPLHDFLCQLS

SEQ ID NO: 71048 - protein, 61 aa, Homo sapiens
IALPLTLLVLLAGYNHDKLIPLLLQLTSRLQGVGALGQAASDNSGPEDAKRQAKKQKTRRT

SEQ ID NO: 71049 - protein, 61 aa, Homo sapiens; identical to SEQ ID NO: 71048

SEQ ID NO: 71050 - protein, 844 aa, Homo sapiens
LAILLLQGLVVWSFSGLEEDEAGEKGRQRKPRPLDPGEGSKDTDSSAGRRGSTGRRHGRWRGRAESPGVPVAKVVRAVTSRQRASRRVPPAPPPEAPGRQNLSGAAAGEALVGAAGFPPHGDTGSVEGAPQPTDNGFTPKCEIVGKDALSALARASTKQCQQEIANVVCLHQAGSLMPKAVPRHCQLTGKMSPGIQWDESQAQQPMDGPPVRIAYMLVVHGRAIRQLKRLLKAVYHEQHFFYIHVDKRSDYLHREVVELAQGYDNVRVTPWRMVTIWGGASLLRMYLRSMRDLLEVPGWAWDFFINLSATDYPTRTNEELVAFLSKNRDKNFLKSHGRDNSRFIKKQGLDRLFHECDSHMWRLGERQIPAGIVVDGGSDWFVLTRSFVEYVVYTDDPLVAQLRQFYTYTLLPAESFFHTVLENSLACETLVDNNLRVTNWNRKLGCKCQYKHIVDWCGCSPNDFKPQDFLRLQQVSRPTFFARKFESTVNQEVLEILDFHLYGSYPPGTPALKAYWENTYDAADGPSGLSDVMLTAYTAFARLSLHHAATAAPPMGTPLCRFEPRGLPSSVHLYFYDDHFQGYLVTQAVQPSAQGPAETLEMWLMPQGSLKLLGRSDQASRLQSLEVGTDWDPKERLFRNFGGLLGPLDEPVAVQRWARGPNLTATVVWIDPTYVVATSYDITVDTETEVTQYKPPLSRPLRPGPWTVRLLQFWEPLGETRFLVLPLTFNRKLPLRKDDASWLHAGPPHNEYMEQSFQGLSSILNLPQPELAEEAAQRHTQLTGPALEAWTDRELSSFWSVAGLCAIGPSPCPSLEPCRLTSWSSLSPDPKSELGPVKADGRLR

SEQ ID NO: 71051 - protein, 218 aa, Homo sapiens
LPTYRYHVLLGLVVSLGGLTESTIRHSTQSLFEYMKGIQSDPQALGSFSGTLLQIFEDNLLNERVSVPLLKTLDHVLTHGCFDIFTTEEDHPFAVKLLALCKKEIKNSKDIQKLLSGIAVFCEMVQFPGDVRRQALLQLCLLLCHRFPLIRKTTASQVYETLLTYSDVVGADVLDEVVTVLSDTAWDAELAVVREQRNRLCDLLGVPRPQLVPQPGAC

SEQ ID NO: 71052 - protein, 146 aa, Homo sapiens
LGQWLLIYFGFTHCPDVCPEELEKMIQVVDEIDSITTLPDLTPLFISIDPERDTKEAIANYVKEFSPKLVGLTGTREEVDQVARAYRVYYSPGPKDEDEDYIVDHTIIMYLIGPDGEFLDYFGQNKRKGEIAASIATHMRPYRKKS

SEQ ID NO: 71053 - protein, 11 aa, Homo sapiens
IFWASWIQFFI

SEQ ID NO: 71054 - protein, 13 aa, Homo sapiens
VVGKLLFFGVFFF

SEQ ID NO: 71055 - protein, 25 aa, Homo sapiens
VGTVLVFLGLGLDAKFGKGAKKTSH

SEQ ID NO: 71056 - protein, 686 aa, Homo sapiens
IVLQAPSTLEALLQSLVIVLLGFRSLLSDLCSYEVLNLLTAQQYEIFSRSFHKNRELFVHGLPGLGKTIMAMKIMEKIRNVFHCEAHRILYICESQFLRNFIRKEFLRGNGLAAGKMNISIDLDTNYAELVLNVGRVTLGENNRKKMKDCQLRKQQNENVSRAVCALLNSGGGVIKAEVENKGYSYKKDGIGLDLENSFSNMLPFVPNFLDFMQNGNYFHIFVKSWSLETSGPQIATLSSSLYKRDVTSAKVMNASAALEFLKDMEKTGGRAYLRPEFPAKRACVDVQEESNMEALAADFFNRTELGYKEKLTFTESTHVEIKNFSTEKLLQRITEILPQYVSAFANTDGGYLFVGLNEDKEVIGFKAEKSYLTKLEEVTKNSIGKLPVHHFCVEKGTINYLCKFLGVYDKGRLCGYVYALRVERFCCAVFAKKPDSWHVKDNRVKQLTEKEWIQFMVDSEPVCEELPSPASTSSPVSQSYPLREYINFKIQPLRYHLPGLSEKITCAPKTFCRNLFSQHEGLKQLICEEMGSVNKGSLIFSRSWSLDLGLQENHKVLCDALLISQDKPPVLYTFHMVQDEEFKDYSTQTAQTLKQKLAKIGGYTKKVCVMTKIFYLSPEGKTSCQYDLNSQVIYPESYYWTTAQTMKDLEKALSNILPKENQIFLFVCLFRFCLFVCWFVCFFLR

SEQ ID NO: 71057 - protein, 228 aa, Homo sapiens
RLALSPVPSHWMVALLLLLSAAEPVPAARSEDRYRNPKGSACSRIWQSPRFIARKRGFTVKMHCYMNSASGNVSWLWKQEMDENPQQLKLEKGRMEESQNESLATLTIQGIRFEDNGIYFCQQKCNNTSEVYQGCGTELRVMGFSTLAQLKQRNTLKDGIIMIQTLLIILFIIVPIFLLLDKDDSKAGMEEDHTYEGLDIDQTATYEDIVTLRTGEVKWSVGEHPGQE

SEQ ID NO: 71058 - protein, 18 aa, Homo sapiens
ILVGAFVGWTLFFQQNAL

SEQ ID NO: 71059 - protein, 2117 aa, Homo sapiens
LWPLFLFFILVAVRHSHPPLEHHECHFPNKPLPSAGTVPWLQGLICNVNNTCFPQLTPGEEPGRLSNFNDSLVSRLLADARTVLGGASAHRTLAGLGKLIATLRAARSTAQPQPTKQSPLEPPMLDVAELLTSLLRTESLGLALGQAQEPLHSLLEAAEDLAQELLALRSLVELRALLQRPRGTSGPLELLSEALCSVRGPSSTVGPSLNWYEASDLMELVGQEPESALPDSSLSPACSELIGALDSHPLSRLLWRRLKPLILGKLLFAPDTPFTRKLMAQVNRTFEELTLLRDVREVWEMLGPRIFTFMNDSSNVAMLQRLLQMQDEGRRQPRPGGRDHMEALRSFLDPGSGGYSWQDAHADVGHLVGTLGRVTECLSLDKLEAAPSEAALVSRALQLLAEHRFWAGVVFLGPEDSSDPTEHPTPDLGPGHVRIKIRMDIDVVTRTNKIRDRFWDPGPAADPLTDLRYVWGGFVYLQDLVERAAVRVLSGANPRAGLYLQQMPYPCYVDDVFLRVLSRSLPLFLTLAWIYSVTLTVKAVVREKETRLRDTMRAMGLSRAVLWLGWFLSCLGPFLLSAALLVLVLKLGDILPYSHPGVVFLFLAAFAVATVTQSFLLSAFFSRANLAAACGGLAYFSLYLPYVLCVAWRDRLPAGGRVAASLLSPVAFGFGCESLALLEEQGEGAQWHNVGTRPTADVFSLAQVSGLLLLDAALYGLATWYLEAVCPGQYGIPEPWNFPFRRSYWCGPRPPKSPAPCPTPLDPKVLVEEAPPGLSPGVSVRSLEKRFPGSPQPALRGLSLDFYQGHITAFLGHNGAGKTTTLSILSGLFPPSGGSAFILGHDVRSSMAAIRPHLGVCPQYNVLFDMLTVDEHVWFYGRLKGLSAAVVGPEQDRLLQDVGLVSKQSVQTRHLSGGMQRKLSVAIAFVGGSQVVILDEPTAGVDPASRRGIWELLLKYREGRTLILSTHHLDEAELLGDRVAVVAGGRLCCCGSPLFLRRHLGSGYYLTLVKARLPLTTNEKADTDMEGSVDTRQEKKNGSQGSRVGTPQLLALVQHWVPGARLVEELPHELVLVLPYTGAHDGSFATLFRELDTRLAELRLTGYGISDTSLEEIFLKVVEECAADTDMEDGSCGQHLCTGIAGLDVTLRLKMPPQETALENGEPAGSAPETDQGSGPDAVGRVQGWALTRQQLQALLLKRFLLARRSRRGLFAQIVLPALFVGLALVFSLIVPPFGHYPALRLSPTMYGAQVSFFSEDAPGDPGRARLLEALLQEAGLEEPPVQHSSHRFSAPEVPAEVAKVLASGNWTPESPSPACQCSRPGARRLLPDCPAAAGGPPPPQAVTGSGEVVQNLTGRNLSDFLVKTYPRLVRQGLKTKKWVNEVRYGGFSLGGRDPGLPSGQELGRSVEELWALLSPLPGGALDRVLKNLTAWAHSLDAQDSLKIWFNNKGWHSMVAFVNRASNAILRAHLPPGPARHAHSITTLNHPLNLTKEQLSEGALMASSVDVLVSICVVFAMSFVPASFTLVLIEERVTRAKHLQLMGGLSPTLYWLGNFLWDMCNYLVPACIVVLIFLAFQQRAYVAPANLPALLLLLLLYGWSITPLMYPASFFFSVPSTAYVVLTCINLFIGINGSMATFVLELFSDQKLQEVSRILKQVFLIFPHFCLGRGLIDMVRNQAMADAFERLGDRQFQSPLRWEVVGKNLLAMVIQGPLFLLFTLLLQHRSQLLPQPRVRSLPLLGEEDEDVARERERVVQGATQGDVLVLRNLTKVYRGQRMPAVDRLCLGIPPGECFGLLGVNGAGKTSTFRMVTGDTLASRGEAVLAGHSVAREPSAAHLSMGYCPQSDAIFELLTGREHLELLARLRGVPEAQVAQTAGSGLARLGLSWYADRPAGTYSGGNKRKLATALALVGDPAVVFLDEPTTGMDPSARRFLWNSLLAVVREGRSVMLTSHSMEECEALCSRLAIMVNGRFRCLGSPQHLKGRFAAGHTLTLRVPAARSQPAAAFVAAEFPGAELREAHGGRLRFQLPPGGRCALARVFGELAVHGAEHGVEDFSVSQTMLEEVFLYFSKDQGKDEDTEEQKEAGVGVDPAPGLQHPKRVSQFLDDPSTAETVL

SEQ ID NO: 71060 - protein, 10 aa, Homo sapiens
LLPFFFLFSL

SEQ ID NO: 71061 - protein, 51 aa, Homo sapiens
KAKNPQEQKSFFAKYWMYIIPVVLFLMMSGAPDTGGQGGGGGGGGGGGSGR

SEQ ID NO: 71062 - protein, 1366 aa, Homo sapiens
LLLLLSPPLLLLLLPCEAEAAAAAAAVSGSAAAEAKECDRPCVNGGRCNPGTGQCVCPAGWVGEQCQHCGGRFRLTGSSGFVTDGPGNYKYKTKCTWLIEGQPNRIMRLRFNHFATECSWDHLYVYDGDSIYAPLVAAFSGLIVPERDGNETVPEVVATSGYALLHFFSDAAYNLTGFNITYSFDMCPNNCSGRGECKISNSSDTVECECSENWKGEACDIPHCTDNCGFPHRGICNSSDVRGCSCFSDWQGPGCSVPVPANQSFWTREEYSNLKLPRASHKAVVNGNIMWVVGGYMFNHSDYNMVLAYDLASREWLPLNRSVNNVVVRYGHSLALYKDKIYMYGGKIDSTGNVTNELRVFHIHNESWVLLTPKAKEQYAVVGHSAHIVTLKNGRVVMLVIFGHCPLYGYISNVQEYDLDKNTWSILHTQGALVQGGYGHSSVYDHRTRALYVHGGYKAFSANKYRLADDLYRYDVDTQMWTILKDSRFFRYLHTAVIVSGTMLVFGGNTHNDTSMSHGAKCFSSDFMAYDIACDRWSVLPRPDLHHDVNRFGHSAVLHNSTMYVFGGFNSLLLSDILVFTSEQCDAHRSEAACLAAGPGIRCVWNTGSSQCISWALATDEQEEKLKSECFSKRTLDHDRCDQHTDCYSCTANTNDCHWCNDHCVPRNHSCSEGQISIFRYENCPKDNPMYYCNKKTSCRSCALDQNCQWEPRNQECIALPENICGIGWHLVGNSCLKITTAKENYDNAKLFCRNHNALLASLTTQKKVEFVLKQLRIMQSSQSMSKLTLTPWVGLRKINVSYWCWEDMSPFTNSLLQWMPSEPSDAGFCGILSEPSTRGLKAATCINPLNGSVCERPANHSAKQCRTPCALRTACGDCTSGSSECMWCSNMKQCVDSNAYVASFPFGQCMEWYTMSTCPPENCSGYCTCSHCLEQPGCGWCTDPSNTGKGKCIEGSYKGPVKMPSQAPTGNFYPQPLLNSSMCLEDSRYNWSFIHCPACQCNGHSKCINQSICEKCENLTTGKHCETCISGFYGDPTNGGKCQPCKCNGHASLCNTNTGKCFCTTKGVKGDECQLCEVENRYQGNPLRGTCYYTLLIDYQFTFSLSQEDDRYYTAINFVATPDEQNRDLDMFINASKNFNLNITWAASFSAGTQAGEEMPVVSKTNIKEYKDSFSNEKFDFRNHPNITFFVYVSNFTWPIKIQIAFSQHSNFMDLVQFFVTFFSCFLSLLLVAAVVWKIKQSCWASRRREQLLREMQQMASRPFASVNVALETDEEPPDLIGGSIKTVPKPIALEPCFGNKAAVLSVFVRLPRGLGGIPPPGQSGLAVASALVDISQQMPIVYKEKSGAVRNRKQQPPAQPGTCI

SEQ ID NO: 71063 - protein, 38 aa, Homo sapiens
RRRDFSMQTFICSACTVIFIPCCWPSDGWTDAPFTSVQ

SEQ ID NO: 71064 - protein, 45 aa, Homo sapiens
VYWLSALLQLKQLLQAKPFQPALPLVVLVPSPGGDAVEKEVEDGL

SEQ ID NO: 71065 - protein, 33 aa, Homo sapiens
RDMLGLRPPLLALVGLLSLGCGEFCVPRRGLHA

SEQ ID NO: 71066 - protein, 66 aa, Homo sapiens
VFVVLLALVAGVLGNEFSILKSPGSVVFRNGNWPIPGERIPDVAALSMGFSVKEVCIYFLNVWSCF

SEQ ID NO: 71067 - protein, 10 aa, Homo sapiens
LFLLYNFIFL

SEQ ID NO: 71068 - protein, 31 aa, Homo sapiens
METLLFALAYSFFFFPPWSWSCGAALKCISK

SEQ ID NO: 71069 - protein, 172 aa, Homo sapiens
MLLLLTLALLGGPTWAGKMYGPGGGKYFSTTEDYDHEITGLRVSVGLLLVKSVQVKLGDSWDVKLGALGGNTQEVTLQPGEYITKVFVAFQAFLRGMVMYTSKDRYFYFGKLDGQISSAYPSQEGQVLVGIYGQYQLLGIKSIGFEWNYPLEEPTTEPPVNLTYSANSPVGR

SEQ ID NO: 71070 - protein, 228 aa, Homo sapiens
MSPTVIILACLGFFLDQSVWAHVGLYEKPSLTARPGPTVRAGENVTLSCSSQSSFDIYHLSREGEAHELRLPAVPSINGTFQADFPLGPATHGETYRCFGSFHGSPYEWSDPSDPLPVSVTDAAVMNQEPAGHRTVNREDSDEQDPQEVTYAQLDHCIFTQRKITGPSQRSKRPSTDTSVCIELPNAEPRALSPAHEHHSQALMGSSRETTALSQTQLASSNVPAAGI

SEQ ID NO: 71071 - protein, 133 aa, Homo sapiens
MESKGASSCRLLFCLLISATVFRPGLGWYTVNSAYGDTIIIPCRLDVPQNLMFGKWKYEKPDGSPVFIAFRSSTKKSVQYDDVPEYKDRLNLSENYTLSISNARISDEKRFVCMLVTEDNVFEAPTIVKVFSK

SEQ ID NO: 71072 - protein, 146 aa, Homo sapiens
MERIVICLMVIFLGTLVHKSSSQGQDRHMIRMRQLIDIVDQLKNYVNDLVPEFLPAPEDVETNCEWSAFSCFQKAQLKSANTGNNERIINVSIKKLKRKPPSTNAGRRQKHRLTCPSCDSYEKKPPKEFLERFKSLLQKVSTLSFI

SEQ ID NO: 71073 - protein, 34 aa, Homo sapiens
MAVGISLFIVAWVHLTASVTRMGKEWNDILERCL

SEQ ID NO: 71074 - protein, 365 aa, Homo sapiens
MLGPFTMGIGIFIFICANAILHENRDKETKIIHMRDIYSTVIDIHTLRIKEQRQMNGMYTGLMGETEVKQNGSSCASRLAANTIASFSGFRSSFRMDSSVEEDELMLNEGKSSGHLMPPLLSDSSVSVFGLYPPPSKTTDDKTSGSKKCETKSIVSSSISAFTLPVIKLNNCVIDEPSIDNITEDADNLKSRSRNLSMDSLVVPLPNTSESFQPVSTVLPRNNSIGESLSSQYKSSMALGPGAGQLLSPGAARRQFGSNTSLHLLSSHSKSLDLDRGPSTLTVQAEQRKHPSWPRLDRNNSKGYMKLENKEDPMDRLLVPQVAIKKDFTNKEKLLMISRSHNNLSFEHDEFLSNNLKRGTSETRF

SEQ ID NO: 71075 - protein, 91 aa, Homo sapiens
MAEVLKGLTCLLLLFAQKRGNVKHLVLFLHEAVLVQYVDTLKLAVPSLIYTLQNNLQYVAISNLPAATFQVSPKPSMAPEELTGLGTGVWE

SEQ ID NO: 71076 - protein, 102 aa, Homo sapiens
MFALGCLIAFLGVFLITRNRKKPIPFEPYISMDAMPGMQNMHDKGMTVQPELKASFSYGALENNDNISEIYAPATLPVMQEEHGSRSASGVPYRVLEHTKKE

SEQ ID NO: 71077 - protein, 28 aa, Homo sapiens
VIFLVSALSSILFLYLAHKQAPEKQMAP

SEQ ID NO: 71078 - protein, 28 aa, Homo sapiens
VIFLVSALSSILFLYLAHKQAPEKQMAP

SEQ ID NO: 71079 - protein, 164 aa, Homo sapiens
LPNLSCMFALLLADRSWLLEQHTLEAFTQFAEGTNHEEIVPQCLSSEETKNKVVSFLEKTGFVDETEAAKVERVKQEKGIFWEPFANVTVEEAKRSSLQPYAKRARQEFPWEEEYRSALHTIAGALEATESLLQKGPAPAWLSMEMEALQERMDKLKRYIHTLG

SEQ ID NO: 71080 - protein, 155 aa, Homo sapiens
MWSLGVIMYILLCGYPPFYSNHGLAISPGMKTRIRMGQYEFPNPEWSEVSEEVKMLIRNLLKTEPTQRMTITEFMNHPWIMQSTKVPQTPLHTSRVLKEDKERWEDVKEEMTSALATMRVDYEQIKIKKIEDASNPLLLKRRKKARALEAAALAH

SEQ ID NO: 71081 - protein, 27 aa, Homo sapiens
KRVVFLKQLASGLLLVTGPLALNRVPL

SEQ ID NO: 71082 - protein, 49 aa, Homo sapiens
IRACFLGFVFGCGTLLSFSQSSWSHFGWSHLVHPHSHCRIFPYTMISVP

SEQ ID NO: 71083 - protein, 42 aa, Homo sapiens
IVLLHMLLSVGCLAYFFDAPEMDHLPTTTATPNQTVAAAKSS

SEQ ID NO: 71084 - protein, 440 aa, Homo sapiens
KMEPSTAARAWALFWLLLPLLGAVCASGPRTLVLLDNLNVRETHSLFFRSLKDRGFELTFKTADDPSLSLIKYGEFLYDNLIIFSPSVEDFGGNINVETISAFIDGGGSVLVAASSDIGDPLRELGSECGIEFDEEKTAVIDHHNYDISDLGQHTLIVADTENLLKAPTIVGKSSLNPILFRGVGMVADPDNPLVLDILTGSSTSYSFFPDKPITQYPHAVGKNTLLIAGLQARNNARVIFSGSLDFFSDSFFNSAVQKAAPGSQRYSQTGNYELAVALSRWVFKEEGVLRVGPVSHHRVGETAPPNAYTVTDLVEYSIVIQQLSNGKWVPFDGDDIQLEFVRIDPFVRTFLKKKGGKYSVQFKLPDVYGVFQFKVDYNRLGYTHLYSSTQVSVRPLQHTQYERFIPSAYPYYASAFSMMLGLFIFSIVFLHMKEKEKSD

SEQ ID NO: 71085 - protein, 15 aa, Homo sapiens
LAVFFFFLQGISVST

SEQ ID NO: 71086 - protein, 33 aa, Homo sapiens
RRQRFLGFCLVLSLQKVLPVPPALGTRLCIASP

SEQ ID NO: 71087 - protein, 291 aa, Homo sapiens
RKLLCLFILAILLCSLALGSVTVHSSEPEVRIPENNPVKLSCAYSGFSSPRVEWKFDQGDTTRLVCYNNKITASYEDRVTFLPTGITFKSVTREDTGTYTCMVSEEGGNSYGEVKVKLIVLVPPSKPTVNIPSSATIGNRAVLTCSEQDGSPPSEYTWFKDGIVMPTNPKSTRAFSNSSYVLNPTTGELVFDPLSASDTGEYSCEARNGYGTPMTSNAVRMEAVERNVGVIVAAVLVTLILLGILVFGIWFAYSRGHFDRTKKGTSSKKVIYSQPSARSEGEFKQTSSFLV

SEQ ID NO: 71088 - protein, 12 aa, Homo sapiens
VIIILIVMKYRT

SEQ ID NO: 71089 - protein, 40 aa, Homo sapiens
IYASYFALIAVVFLASGAVSVMKKCRKLEDPQSSSQVTTS

SEQ ID NO: 71090 - protein, 35 aa, Homo sapiens
LLIKTFPLKLASGLISLFQESLWLVGFQYAPVPDC

SEQ ID NO: 71091 - protein, 414 aa, Homo sapiens
RKLYFLLLHAKFLPLDLFGSVAEKPDIPGLPETSHKLNRESGLNKDAFPQYIHNMLSTSRSRFIRNTNESGEEVTTFFDYDYGAPCHKFDVKQIGAQLLPPLYSLVFIFGFVGNMLVVLILINCKKLKCLTDIYLLNLAISDLLFLITLPLWAHSAANEWVFGNAMCKLFTGLYHIGYFGGIFFIILLTIDRYLAIVHAVFALKARTVTFGVVTSVITWLVAVFASVPGIIFTKCQKEDSVYVCGPYFPRGWNNFHTIMRNILGLVLPLLIMVICYSGILKTLLRCRNEKKRHRAVRVIFTIMIVYFLFWTPYNIVILLNTFQEFFGLSNCESTSQLDQATQVTETLGMTHCCINPIIYAFVGEKFRRYLSVFFRKHITKRFCKQCPVFYRETVDGVTSTNTPSTGEQEVSAGL

SEQ ID NO: 71092 - protein, 83 aa, Homo sapiens
IGVIAYILLCGYPPFYDENDAKLFEQILKAEYEFDSPYWDDISDSAKDFIRHLMEKDPEKRFTCEQALQHPCKPSMPRLWCGT

SEQ ID NO: 71093 - protein, 30 aa, Homo sapiens
VFVLWICICYTLPCNMKSILRGAASGSGSN

SEQ ID NO: 71094 - protein, 81 aa, Homo sapiens
LIVGIITPVFYLLYYEILAKVDVSHHSTVDSSHLHSKITPPSQQREMENGIVPTKGIHFSQQDDHKLYSQDSQSPAAQQET

SEQ ID NO: 71095 - protein, 182 aa, Homo sapiens
LQYSWMFLMAFALGWRSYRQSSANLLCFAPDLIINEQRMTLPCMYDQCKHMLYVSSELHRLQVSYEEYLCMKTLLLLSSVPKDGLKSQELFDEIRMTYIKELGKAIVKREGNSSQNWQRFYQLTKLLDSMHEVVENLLNYCFQTFLDKTMSIEFPEMLAEIITNQIPKYSNGNIKKLLFHQK

SEQ ID NO: 71096 - protein, 356 aa, Homo sapiens
IFFPDAEVGVMAPRSLLLLLSGALALTDTWAGSHSLRYFSTAVSRPGRGEPRYIAVEYVDDTQFLRFDSDAAIPRMEPREPWVEQEGPQYWEWTTGYAKANAQTDRVALRNLLRRYNQSEAGSHTLQGMNGCDMGPDGRLLRGYHQHAYDGKDYISLNEDLRSWTAADTVAQITQRFYEAEEYAEEFRTYLEGECLELLRRYLENGKETLQRADPPKAHVAHHPISDHEATLRCWALGFYPAEITLTWQRDGEEQTQDTELVETRPAGDGTFQKWAAVVVPPGEEQRYTCHVQHEGLPQPLILRWEQSPQPTIPIVGIVAGLVVLGAVVTGAVVAAVMWRKKSSDRNRGSYSQAAV

SEQ ID NO: 71097 - protein, 46 aa, Homo sapiens
RLRVMESRTLLLLFSGAVALIQTWADYNYNQGRNDLIFTLQLWKRQ

SEQ ID NO: 71098 - protein, 36 aa, Homo sapiens
ILVFVAVEILLTFKIKVMALNSAEKITKFLENVSVL

SEQ ID NO: 71099 - protein, 421 aa, Homo sapiens
LARPAALTALLLLLLGHGGGGRWGARAQEAAAAAADGPPAADGEDGQDPHSKHLYTADMFTHGIQSAAHFVMFFAPWCGHCQRLQPTWNDLGDKYNSMEDAKVYVAKVDCTAHSDVCSAQGVRGYPTLKLFKPGQEAVKYQGPRDFQTLENWMLQTLNEEPVTPEPEVEPPSAPELKQGLYELSASNFELHVAQGDHFIKFFAPWCGHCKALAPTWEQLALGLEHSETVKIGKVDCTQHYELCSGNQVRGYPTLLWFRDGKKVDQYKGKRDLESLREYVESQLQRTETGATETVTPSEAPVLAAEPEADKGTVLALTENNFDDTIAEGITFIKFYAPWCGHCKTLAPTWEELSKKEFPGLAGVKIAEVDCTAERNICSKYSVRGYPTLLLFRGGKKVSEHSGGRDLDSLHRFVLSQAKDEL

SEQ ID NO: 71100 - protein, 48 aa, Homo sapiens
VLTLLVLMLIMVYGFWKKRHMASYSMCSDPSTRDPPGRPEPYVEVYLI

SEQ ID NO: 71101 - protein, 317 aa, Homo sapiens
LPLGLLLWSGLALGALPFGSSPHRVFHDLLSEQQLLEVEDLSLSLLQGGGLGPLSLPPDLPDLDPECRELLLDFANSSAELTGCLVRSARPVRLCQTCYPLFQQVVSKMDNISRAAGNTSESQSCARSLLMADRMQIVVILSEFFNTTWQEANCANCLTNNSEELSNSTVYFLNLFNHTLTCFEHNLQGNAHSLLQTKNYSEVCKNCREAYKTLSSLYSEMQKMNELENKAEPGTHLCIDVEDAMNITRKLWSRTFNCSVPCSDTVPVIAVSVFILFLPVVFYLSSFLHSEQKKRKLILPKRLKSSTSFANIQENSN

SEQ ID NO: 71102 - protein, 92 aa, Homo sapiens
VCISIVYILYTLLHRHTNAPIYTGQEHNHVIISTKELRNPARKDIGGGLALKLLFKTRKRRRKRKKRKMLGNIYLTCSTARTLASCCYSCKY

SEQ ID NO: 71103 - protein, 9 aa, Homo sapiens
IFIIIGFYI

SEQ ID NO: 71104 - protein, 489 aa, Homo sapiens
LLLHPAFQSCLLLTLLGLWRTTPEAHASSLGAPAISAASFLQDLIHRYGEGDSLTLQQLKALLNHLDVGVGRGNVTQHVQGHRNLSTCFSSGDLFTAHNFSEQSRIGSSELQEFCPTILQQLDSRACTSENQENEENEQTEEGRPSAVEVWGYGLLCVTVISLCSLLGASVVPFMKKTFYKRLLLYFIALAIGTLYSNALFQLIPEAFGFNPLEDYYVSKSAVVFGGFYLFFFTEKILKILLKQKNEHHHGHSHYASESLPSKKDQEEGVMEKLQNGDLDHMIPQHCSSELDGKAPMVDEKVIVGSLSVQDLQASQSACYWLKGVRYSDIGTLAWMITLSDGLHNFIDGLAIGASFTVSVFQGISTSVAILCEEFPHELGDFVILLNAGMSIQQALFFNFLSACCCYLGLAFGILAGSHFSANWIFALAGGMFLYISLADMFPEMNEVCQEDERKGSILIPFIIQNLGLLTGFTIMVVLTMYSGQIQIG

SEQ ID NO: 71105 - protein, 77 aa, Homo sapiens
IILYILYMMTSVSSDHCRGAREKPQISAAQSTQPQKQVVQATAEQMRLAQVIFDKNDSDFEAKVKQVCFWQRISSFL

SEQ ID NO: 71106 - protein, 309 aa, Homo sapiens
ISLGLALAGVLTGYIYPRLYCLFAECCGQKRSLSREALQKDLDDNLFGQHLAKKIILNAVFGFINNPKPKKPLTLSLHGWTGTGKNFVSKIIAENIYEGGLNSDYVHLFVATLHFPHASNITLYKDQLQLWIRGNVSACARSIFIFDEMDKMHAGLIDAIKPFLDYYDLVDGVSYQKAMFIFLSNAGAERITDVALDFWRSGKQREDIKLKDIEHALSVSVFNNKNSGFWHSSLIDRNLIDYFVPFLPLEYKHLKMCIRVEMQSRGYEIDEDIVSRVAEEMTFFPKEERVFSDKGCKTVFTKLDYYYDD

SEQ ID NO: 71107 - protein, 20 aa, Homo sapiens
LIVWFIHSGNMLILTVSHCF

SEQ ID NO: 71108 - protein, 220 aa, Homo sapiens
LQNSVYVNFLLTGLVAQLACHPQPLLRSFLLNTNMVFQPSVKSLLQVLGSVKNKIENFAASQEDFPALLSKAKKYLIARGKLDWAEGPAAGPAPRRSDPLVKSRRPSLGELLLRHAHSPTRARQAAQLVLQPGRDGAGLGLSGGSPGASTPVLLTRGGAPERQGEALRVKNAVYCAVIFPEFLKELAAISQAHAVTSPFLLETSEEGSGPLISGCGPLNP

SEQ ID NO: 71109 - protein, 17 aa, Homo sapiens
LGLSCGASLSFLFKALL

SEQ ID NO: 71110 - protein, 63 aa, Homo sapiens
TCVFLVVLLALGIVYCTRCGPHAPNKRITDCYRWVIHAGSKSPTEPMPPRGSLTGVQTCRTSV

SEQ ID NO: 71111 - protein, 8 aa, Homo sapiens
KLVFLLYI

SEQ ID NO: 71112 - protein, 346 aa, Homo sapiens
ILSVFPLAAGIFFVRLLFERFIAKPCALCIGIEDSGPYQAQPNAILEKVFISITKYPDKKRLEGLSKQLDWNVRKIQCWFRHRRNQDKPPTLTKFCESMWRFTFYLCIFCYGIRFLWSSPWFWDIRQCWHNYPFQPLSSGLYHYYIMELAFYWSLMFSQFTDIKRKDFLIMFVHHLVTIGLISFSYINNMVRVGTLIMCLHDVSDFLLEAAKLANYAKYQRLCDTLFVIFSAVFMVTRLGIYPFWILNTTLFESWEIIGPYASWWLLNGLLLTLQLLHVIWSYLIARIALKALIRGKVSKDDRSDVESSSEEEDVTTCTKSPCDSSSSNGANRVNGHMGGSYWAEE

SEQ ID NO: 71113 - protein, 8 aa, Homo sapiens
IAWGVLIT

SEQ ID NO: 71114 - protein, 107 aa, Homo sapiens
ITVTFVLCFTPFHVMLLIRCILEHAVNFEDHSNSGKRTYTMYRITVALTSLNCVADPILYCFVTETGRYDMWNILKFCTGRCNTSQRQRKRILSVSTKDTMELEVLE

SEQ ID NO: 71115 - protein, 295 aa, Homo sapiens
KSTSVFAVASVGHGVFLPLVILCTLLGDGLASVCPLPPEPENGGYICHPRPCRDPLTAGSVIEYLCAEGYMLKGDYKYLTCKNGEWKPAMEISCRLNEDKDTHTSLGVPTLSIVASTASSVALILLLVVLFVLLQPKLKSFHHSRRDQGVSGDQVSIMVDGVQVALPSYEEAVYGSSGHCVPPADPRVQIVLSEGSGPSGRSVPREQQLPDQGACSSAGGEDEAPGQSGLCEAWGSRASETVMVHQATTSSWVAGSGNRQLAHKETADSENSDIQSLLSLTSEEYTDDIPLLKEA

SEQ ID NO: 71116 - protein, 20 aa, Homo sapiens
RDHNKHNRHRSTMALLLLSA

SEQ ID NO: 71117 - protein, 147 aa, Homo sapiens
KPGTLYVYIIYGMYFCMNISSQGDGACVLLRALEPLEGLETMRQLRSTLRKGTASRVLKDRELCSGPSKLCQALAINKSFDQRDLAQDEAVWLERGPLEPSEPAVVAAARVGVGHAGEWARKPLRFYVRGSPWVSVVDRVAEQDTQA

SEQ ID NO: 71118 - protein, 300 aa, Homo sapiens
LLLLLLVIVFIPAFWSLKTHPLWRLWKKIWAVPSPERFFMPLYKGCSGDFKKWVGAPFTGSSLELGPWSPEVPSTLEVYSCHPPRSPAKRLQLTELQEPAELVESDGVPKPSFWPTAQNSGGSAYSEERDRPYGLVSIDTVTVLDAEGPCTWPCSCEDDGYPALDLDAGLEPSPGLEDPLLDAGTTVLSCGCVSAGSPGLGGPLGSLLDRLKPPLADGEDWAGGLPWGGRSPGGVSESEAGSPLAGLDMDTFDSGFVGSDCSSPVECDFTSPGDEGPPRSYLRQWVVIPPPLSSPGPQAS

SEQ ID NO: 71119 - protein, 50 aa, Homo sapiens
RVTPGLGVVAVLLLFLVVREPPRGAVERHSDLPPLNPTSWWADLRALARK

SEQ ID NO: 71120 - protein, 25 aa, Homo sapiens
MSQPDPSWPLLFFPLLWALPLLGPV

SEQ ID NO: 71121 - protein, 114 aa, Homo sapiens
LLALLCWLWHGLAHPASWLQPLGPPATPPGSPPCSLLLDSSLSSNWDDDSLGPSLSPEAVLARTVGSTSTPRSRCTPRDALDLSDINSEPPRGSFPSFEPRNLLSLFEDTLDPT

SEQ ID NO: 71122 - protein, 40 aa, Homo sapiens
VAGLGMELSALCVGGLGLCLHPAQGCPSLGSPAWLLLGPE

SEQ ID NO: 71123 - protein, 60 aa, Homo sapiens [sequence omitted]

SEQ ID NO: 71124 - protein, 32 aa, Homo sapiens
VGFLVVLTLTHFGLLASPFLSGLNLLGKRKTR

SEQ ID NO: 71125 - protein, 44 aa, Homo sapiens
LFGVSRALGVLAQLIWSRALGFPLERPKSMSTEGLMKFVDSKSG

SEQ ID NO: 71126 - protein, 252 aa, Homo sapiens
LLLLLLMAVAAPSRARGSGCRAGTGARGAGAEGREGEACGTVGLLLEHSFEIDDSANFRKRGSLLWNQQDGTLSLSQRQLSEEERGRLRDVAALNGLYRVRIPRRPGALDGLEAGGYVSSFVPACSLVESHLSDQLTLHVDVAGNVVGVSVVTHPGGCRGHEVEDVDLELFNTSVQLQPPTTAPGPETAAFIERLEMEQAQKAKNPQEQKSFFAKYWMYIIPVVLFLMMSGAPDTGGQGGGGGGGGGGGSGR

SEQ ID NO: 71127 - protein, 34 aa, Homo sapiens
KILLLCLCLIILSFHKKKAVRAVEVEENVYAVMG

SEQ ID NO: 71128 - protein, 233 aa, Homo sapiens
VLAPAWSPTTYLLLLLLLSSGLSGTQDCSFQHSPISSDFAVKIRELSDYLLQDYPVTVASNLQDEELCGGLWRLVLAQRWMERLKTVAGSKMQGLLERVNTEIHFVTKCAFQPPPSCLRFVQTNISRLLQETSEQLVALKPWITRQNFSRCLELQCQPDSSTLPPPWSPRPLEATAPTAPQPPLLLLLLLPVGLLLLAAAWCLHWQRTRRRTPRPGEQVPPVPSPQDLLLVEH

SEQ ID NO: 71129 - protein, 313 aa, Homo sapiens
LSFVVPGAIVAAMGIVCFLFLIEHPNDVRCSSTLVTHSKGYENGTNRLRLQKQILKSEKNKPLDPEMQCLLLSDGKGSIHPNHVVILPGDGGSGTAAISFTGALKIPGVIEFSLCLLFAKLVSYTFLFWLPLYITNVDHLDAKKAGELSTLFDVGGIFGGILAGVISDRLEKRASTCGLMLLLAAPTLYIFSTVSKMGLEATIAMLLLSGALVSGPYTLITTAVSADLGTHKSLKGNAHALSTVTAIIDGTGSVGAALGPLLAGLLSPSGWSNVFYMLMFADACALLFLIRLIHKELSCPGSATGDQVPFKEQ

SEQ ID NO: 71130 - protein, 392 aa, Homo sapiens
LRVSVLCIWMSALFLGVGVRAEEAGARVQQNVPSGTDTGDPQSKPLGDWAAGTMDPESSIFIEDAIKYFKEKVSTQNLLLLLTDNEAWNGFVAAAELPRNEADELRKALDNLARQMIMKDKNWHDKGQQYRNWFLKEFPRLKSELEDNIRRLRALADGVQKVHKGTTIANVVSGSLSISSGILTLVGMGLAPFTEGGSLVLLEPGMELGITAALTGITSSTMDYGKKWWTQAQAHDLVIKSLDKLKEVREFLGENISNFLSLAGNTYQLTRGIGKDIRALRRARANLQSVPHASASRPRVTEPISAESGEQVERVNEPSILEMSRGVKLTDVAPVSFFLVLDVVYLVYESKHLHEGAKSETAEELKKVAQELEEKLNILNNNYKILQADQEL

SEQ ID NO: 71131 - protein, 8 aa, Homo sapiens
LGLMVCLF

SEQ ID NO: 71132 - protein, 45 aa, Homo sapiens
MVPLFHLPPLMNLWITQLCTGLPAAAVSVYLGSCPWLSGWDGTWT

SEQ ID NO: 71133 - protein, 56 aa, Homo sapiens
MRAKGFLAPSLVLAVSLELMHPDANSPSECRGDETLTGQFNLYMGESRAQSALRGK

SEQ ID NO: 71134 - protein, 240 aa, Homo sapiens [sequence omitted]

SEQ ID NO: 71135 - protein, 34 aa, Homo sapiens
MKLLSGGWLLSYLPFACMCEPAVSCKAVARASPS

SEQ ID NO: 71136 - protein, 166 aa, Homo sapiens
MILWLKGVVFNVTTVDLKRKPADLHNLAPGTHPPFLTFNGDVKTDVNKIEEFLEETLTPEKYPKLAAKHRESNTAGIDIFSKFSAYIKNTKQQNNAALERGLTKALKKLDDYLNTPLPEEIDANTCGEDKGSRRKFLDGDELTLADCNLLPKLHVVKEQVPLKGMI

SEQ ID NO: 71137 - protein, 359 aa, Homo sapiens
MGIGIFIFICANAILHENRDKETKIIHMRDIYSTVIDIHTLRIKEQRQMNGMYTGLMGETEVKQNGSSCASRLAANTIASFSGFRSSFRMDSSVEEDELMLNEGKSSGHLMPPLLSDSSVSVFGLYPPPSKTTDDKTSGSKKCETKSIVSSSISAFTLPVIKLNNCVIDEPSIDNITEDADNLKSRSRNLSMDSLVVPLPNTSESFQPVSTVLPRNNSIGESLSSQYKSSMALGPGAGQLLSPGAARRQFGSNTSLHLLSSHSKSLDLDRGPSTLTVQAEQRKHPSWPRLDRNNSKGYMKLENKEDPMDRLLVPQVAIKKDFTNKEKLLMISRSHNNLSFEHDEFLSNNLKRGTSETRF

SEQ ID NO: 71138 - protein, 12 aa, Homo sapiens
VAFWACALAVGS

SEQ ID NO: 71139 - protein, 103 aa, Homo sapiens
MVSGICIVFGFIILLLLVLRKRRDSLSLSTQRTQGPAESARNLEYVSVSPTNNTVYASVTHSNRETEIWTPRENDTITIYSTINHSKESKPTFSRATALDNVV

SEQ ID NO: 71140 - protein, 39 aa, Homo sapiens
LVNAMIIVVMWVWKTLNVMTDLKNAQERRKEKKRRRKED

SEQ ID NO: 71141 - protein, 180 aa, Homo sapiens
RMWATQGLAVALALSVLPGSRALRPGDCEVCISYLGRFYQDLKDRDVTFSPATIENELIKFCREARGKENRLCYYIGATDDAATKIINEVSKPLAHHIPVEKICEKLKKKDSQICELKYDKQIDLSTVDLKKLRVKELKKILDDWGETCKGCAEKSDYIRKINELMPKYAPKAASARTDL

SEQ ID NO: 71142 - protein, 127 aa, Homo sapiens
LTIFVLSVVTIIICFTCSCCCLYKTCRRPRPVVTTTTSTTVVHAPYPQPPSVPPSYPGPSYQGYHTMPPQPGMPAAPYPMQYPPPYPAQPMGPPAYHETLAGGAAAPYPASQPPYNPAYMDAPKAAL

SEQ ID NO: 71143 - protein, 16 aa, Homo sapiens
LHSKGFLVFAGCLMKL

SEQ ID NO: 71144 - protein, 217 aa, Homo sapiens
ILLIATSLVVLICSIPLVVRVFVNQLYQPSLEREVSKNPDLQAIRIASVNPILDPWIYILLRKTVLSKAIEKIKCLFCRIGGSRRERSGQHCSDSQRTSSAMSGHSRSFISRELKEISSTSQTLLPDLSLPDLSENGLGGRNLLPGVPGMGLAQEDTTSLRTLRISETSDSSQGQDSESVLLVDEAGGSGRAGPAPKGSSLQVTFPSETLNLSEKCI

SEQ ID NO: 71145 - protein, 64 aa, Homo sapiens
KSEKKIKTTVLTAALLLSGIPAEVINRSMDTYSKMGEVFTDLCVYFFTFIFCHELLDYWGSEVP

SEQ ID NO: 71146 - protein, 48 aa, Homo sapiens
TDRLLLAFLLTLYLGLAHGLDQQDLRYLRAQLQRKLHLLSRPQDGEAE

SEQ ID NO: 71147 - protein, 212 aa, Homo sapiens
LFMVLWLKGVTFNVTTVDTKRRTETVQKLCPGGQLPFLLYGTEVHTDTNKIEEFLEAVLCPPRYPKLAALNPESNTAGLDIFAKFSAYIKNSNPALNDNLEKGLLKALKVLDNYLTSPLPEEVDETSAEDEGVSQRKFLDGNELTLADCNLLPKLHIVQVVCKKYRGFTIPEAFRGVHRYLSNAYAREEFASTCPDDEEIELAYEQVAKALK

SEQ ID NO: 71148 - protein, 22 aa, Homo sapiens
LFVGLFISYVMLKTKRVTKKAQ

SEQ ID NO: 71149 - protein, 798 aa, Homo sapiens
VLGLCCVLLTFGSVRADDEVDVDGTVEEDLGKSREGSRTDDEVVQREEEAIQLDGLNASQIRELREKSEKFAFQAEVNRMMKLIINSLYKNKEIFLRELISNASDALDKIRLISLTDENALSGNEELTVKIKCDKEKNLLHVTDTGVGMTREELVKNLGTIAKSGTSEFLNKMTEAQEDGQSTSELIGQFGVGFYSAFLVADKVIVTSKHNNDTQHIWESDSNEFSVIADPRGNTLGRGTTITLVLKEEASDYLELDTIKNLVKKYSQFINFPIYVWSSKTETVEEPMEEEEAAKEEKEESDDEAAVEEEEEEKKPKTKKVEKTVWDWELMNDIKPIWQRPSKEVEEDEYKAFYKSFSKESDDPMAYIHFTAEGEVTFKSILFVPTSAPRGLFDEYGSKKSDYIKLYVRRVFITDDFHDMMPKYLNFVKGVVDSDDLPLNVSRETLQQHKLLKVIRKKLVRKTLDMIKKIADDKYNDTFWKEFGTNIKLGVIEDHSNRTRLAKLLRFQSSHHPTDITSLDQYVERMKEKQDKIYFMAGSSRKEAESSPFVERLLKKGYEVIYLTEPVDEYCIQALPEFDGKRFQNVAKEGVKFDESEKTKESREAVEKEFEPLLNWMKDKALKDKIEKAVVSQRLTESPCALVASQYGWSGNMERIMKAQAYQTGKDISTNYYASQKKTFEINPRHPLIRDMLRRIKEDEDDKTVLDLAVVLFETATLRSGYLLPDTKAYGDRIERMLRLSLNIDPDAKVEEEPEEEPEETAEDTTEDTEQDEDEEMDVGTDEEEETAKESTAEKDEL

SEQ ID NO: 71150 - protein, 17 aa, Homo sapiens
IIFLLILLQVIINFMFK

SEQ ID NO: 71151 - protein, 44 aa, Homo sapiens
LLLLLFLLLLFLLPIREEDRSCTLANNFARSFTLMLRYNGPPPT

SEQ ID NO: 71152 - protein, 14 aa, Homo sapiens
IIGLVILSYIIYLL

SEQ ID NO: 71153 - protein, 291 aa, Homo sapiens
LHVFAVVSAMLPLLRCVPRVLGSSVAGLRAAAPASPFRQLLQPAPRLCTRPFGLLSVRAGSERRPGLLRPRGPCACGCGCGSLHTDGDKAFVDFLSDEIKEERKIQKHKTLPKMSGGWELELNGTEAKLVRKVAGEKITVTFNINNSIPPTFDGEEEPSQGQKVEEQEPELTSTPNFVVEVIKNDDGKKALVLDCHYPEDEVGQEDEAESDIFSIREVSFQSTGESEWKDTNYTLNTDSLDWALYDHLMDFLADRGVDNTFADELVELSTALEHQEYITFLEDLKSFVKSQ

SEQ ID NO: 71154 - protein, 351 aa, Homo sapiens
KNACVSLVFSFLYKVVQVFSEYFKELEEESIRDNFVIIYELLDELMDFGYPQTTDSKILQEYITQEGHKLETGAPRPPATVTNAVSWRSEGIKYRKNEVFLDVIESVNLLVSANGNVLRSEIVGSIKMRVFLSGMPELRLGLNDKVLFDNTGRGKSKSVELEDVKFHQCVRLSRFENDRTISFIPPDGEFELMSYRLNTHVKPLIWIESVIEKHSHSRIEYMIKAKSQFKRRSTANNVEIHIPVPNDADSPKFKTTVGSVKWVPENSEIVWSIKSFPGGKEYLMRAHFGLPSVEAEDKEGKPPISVKFEIPYFTTSGIQVRYLKIIEKSGYQALPWVRYITQNGDYQLRTQ

SEQ ID NO: 71155 - protein, 45 aa, Homo sapiens
LAVKAAFFGLLGYSLYWMGRRTASLVLSLPAAQYCLQRVTEARHK

SEQ ID NO: 71156 - protein, 644 aa, Homo sapiens
MMPIVNISEVLGPLCLMLLMGTVHCQIVSTQITRPSGNNGNRRRRKLRKTVNGDGSRENGNNSSDKVRGIETLESVPIIGGFWETIFGNRIKRVKLISNKGTETDNDPSCVHPIIKRRQCRPEIRMWQTREKAKFSDGEKCRREAFRRLGNGVSDDLSSEEDGEARTQMILLRRSVEGASSDNGCEVKNRKSILSRHLNSQVKKTTTRWCHIVRDSDSLAESEFESAAFSQGSRSGVSGGSRSLNMSRRDSESTRHDSETEDMLWDDLLHGPECRSSVTSDSEGAHVNTLHSGTKRDPKEDVFQQNHLFWLQNSSPSSDRVSAIIWEGNECKKMDMSVLEISGIIMSRVNAYQQGVGYQMLGNVVTIGLAFFPFLHRLFREKSLDQLKSISAEEILTLFCGAPPVTPIIVLSIINFFERLCLTWMFFFMMCVAERTYKQRFLFAKLFSHITSARKARKYEIPHFRLKKVENIKIWLSLRSYLKRRGPQRSVDVVVSSVFLLTLSIAFICCAQVLQGHKTFLNDAYNWEFLIWETALLLFLLRLASLGSETNKKYSNVSILLTEQINLYLKMEKKPNKKEQLTLVNNVLKLSTKLLKELDTPFRLYGLTMNPLIYNITRVVILSAVSGVISDLLGFNIRLWKIKS

SEQ ID NO: 71157 - protein, 293 aa, Homo sapiens
MKLFDASPTFFAFLLGHILAMEAQSWCLQHDLGHASIFKKSWWNHVAQKFVMGQLKGFSAHWWNFRHFQHHAKPNIFHKDPDVTVAPVFLLGESSVEYGKKKRRYLPYNQQHLYFFLIGPPLLTLVNFEVENLAYMLVCMQWADLLWAASFYARFFLSYLPFYGVPGVLLFFVAVRVLESHWFVWITQMNHIPKEIGHEKHRDWVSSQLAATCNVEPSLFTNWFSGHLNFQIEHHLFPRMPRHNYSRVAPLVKSLCAKHGLSYEVKPFLTALVDIVRSLKKSGDIWLDAYLHQ

SEQ ID NO: 71158 - protein, 495 aa, Homo sapiens
MPLALLVLLLLGPGGWCLAEPPRDSLREELVITPLPSGDVAATFQFRTRWDSELQREGVSHYRLFPKALGQLISKYSLRELHLSFTQGFWRTRYWGPPFLQAPSGAELWVWFQDTVTDVDKSWKELSNVLSGIFCASLNFIDSTNTVTPTASFKPLGLANDTDHYFLRYAVLPREVVCTENLTPWKKLLPCSSKAGLSVLLKADRLFHTSYHSQAVHIRPVCRNARCTSISWELRQTLSVVFDAFITGQGKKDWSLFRMFSRTLTEPCPLASESRVYVDITTYNQDNETLEVHPPPTTTYQDVILGTRKTYAIYDLLDTAMINNSRNLNIQLKWKRPPENEAPPVPFLHAQRYVSGYGLQKGELSTLLYNTHPYRAFPVLLLDTVPWYLRLYVHTLTITSKGKENKPSYIHYQPAQDRLQPHLLEMLIQLPANSVTKVSIQFERALLKWTEYTPDPNHGFYVSPSVLSALVPSMVAAKPVDWEESPLFNSLLPWT

SEQ ID NO: 71159 - protein, 576 aa, Homo sapiens [sequence omitted]

SEQ ID NO: 71160 - protein, 270 aa, Homo sapiens
MQLRNPELHLGCALALRFLALVSWDIPGARALDNGLARTPTMGWLHWERFMCNLDCQEEPDSCISEKLFMEMAELMVSEGWKDAGYEYLCIDDCWMAPQRDSEGRLQADPQRFPHGIRQLANYVHSKGLKLGIYADVGNKTCAGFPGSFGYYDIDAQTFADWGVDLLKFDGCYCDSLENLADGYKHMSLALNRTGRSIVYSCEWPLYMWPFQKPNYTEIRQYCNHWRNFADIDDSWKSIKSILDWTSFNQERIVDVAGPGGWNDPDMVKT

SEQ ID NO: 71161 - protein, 26 aa, Homo sapiens
ILLFMILLTATSASQVQAILLPQPPK

SEQ ID NO: 71162 - protein, 107 aa, Homo sapiens
LVICFFSIWSILGLSGFHTYLVASNLTTNEDIKGSWSSKRGGEASVNPYSHKSIITNCCAVLCGPLPPSLIDRRGFVQSDTVLPSPIRSDEPACRAKPDASMVGGHP

SEQ ID NO: 71163 - protein, 8 aa, Homo sapiens
IILILIWI

SEQ ID NO: 71164 - protein, 14 aa, Homo sapiens
VMTCFLLALRIISI

SEQ ID NO: 71165 - protein, 347 aa, Homo sapiens
IGLAPCCLWLLGAVLLMDASARPANHSSTRERVANREENEILPPDHLNGVKLEMDGHLNRGFHQEVFLGKDLGGFDEDAEPRRSRRKLMVIFSKVDVNTDRKISAKEMQRWIMEKTAEHFQEAMEESKTHFRAVDPDGDGHVSWDEYKVKFLASKGHSEKEVADAIRLNEELKVDEETQEVLENLKDRWYQADSPPADLLLTEEEFLSFLHPEHSRGMLRFMVKEIVRDLDQDGDKQLSVPEFISLPVGTVENQQGQDIDDNWVKDRKKEFEELIDSNHDGIVTAEELESYMDPMNEYNALNEAKQMIAVADENQNHHLEPEEVLKYSEFFTGSKLVDYARSVHEEF

SEQ ID NO: 71166 - protein, 344 aa, Homo sapiens
RTLTVGATAGSITMKRLVCVLLVCSSAVAQLHKDPTLDHHWHLWKKTYGKQYKEKNEEAVRRLIWEKNLKFVMLHNLEHSMGMHSYDLGMNHLGDMTSEEVMSLMSSLRVPSQWQRNITYKSNPNRILPDSVDWREKGCVTEVKYQGSCGACWAFSAVGALEAQLKLKTGKLVSLSAQNLVDCSTEKYGNKGCNGGFMTTAFQYIIDNKGIDSDASYPYKAMDQKCQYDSKYRAATCSKYTELPYGREDVLKEAVANKGPVSVGVDARHPSFFLYRSGVYYEPSCTQNVNHGVLVVGYGDLNGKEYWLVKNSWGHNFGEEGYIRMARNKGNHCGIASFPSYPEI

SEQ ID NO: 71167 - protein, 19 aa, Homo sapiens
IGEAWALGVVLGLMSELTK

SEQ ID NO: 71168 - protein, 188 aa, Homo sapiens
LASCIITAKLCTWAICFLTTSEEVQKKLYEEINQVFGNGPVTPEKIEQLRYCQHVLCETVRTAKLTPVSAQLQDIEGKIDRFIIPRETLVLYALGVVLQDPNTWPSPHKFDPDRFDDELVMKTFSSLGFSGTQECPELRFAYMVTTVLLSVLVKRLHLLSVEGQVIETKYELVTSSREEAWITVSKRY

SEQ ID NO: 71169 - protein, 31 aa, Homo sapiens
ITTISSFVGAWLGALPIPLDWERPWQKQIAR

SEQ ID NO: 71170 - protein, 404 aa, Homo sapiens
LGIALLAYVASVWGNFVNMSFLLNRSIQENGELKIESKIEEMVEPLREKIRDLEKSFTQKYPPVKFLSEKDRKRILITGGAGFVGSHLTDKLMMDGHEVTVVDNFFTGRKRNVEHWIGHENFELINHDVVEPLYIEVDQIYHLASPASPPNYMYNPIKTLKTNTIGTLNMLGLAKRVGARLLLASTSEVYGDPEVHPQSEDYWGHVNPIGPRACYDEGKRVAETMCYAYMKQEGVEVRVARIFNTFGPRMHMNDGRVVSNFILQALQGEPLTVYGSGSQTRAFQYVSDLVNGLVALMNSNVSSPVNLGNPEEHTILEFAQLIKNLVGSGSEIQFLSEAQDDPQKRKPDIKKAKLMLGWEPVVPLEEGLNKAIHYFRKELEYQANNQYIPKPKPARIKKGRTRHS

SEQ ID NO: 71171 - protein, 21 aa, Homo sapiens
VRLFFFSFLVVCTSLGMEGNK

SEQ ID NO: 71172 - protein, 15 aa, Homo sapiens
RTAPRWIFLQLLVWW

SEQ ID NO: 71173 - protein, 7 aa, Homo sapiens
IFLFWTI

SEQ ID NO: 71174 - protein, 13 aa, Homo sapiens
IVLFLLLLIFSTE

SEQ ID NO: 71175 - protein, 16 aa, Homo sapiens
IDVGSIMFSMYLTMCF

SEQ ID NO: 71176 - protein, 24 aa, Homo sapiens
IHMSKLVIPFGHLMLSCCCVMELP

SEQ ID NO: 71177 - protein, 11 aa, Homo sapiens
MLALLILPAFG

SEQ ID NO: 71178 - protein, 652 aa, Homo sapiens
TDMILFSLIVGLLTYWFLFRKKKEEVPEFTKIQTLTSSVRESSFVEKMKKTGRNIIVFYGSQTGTAEEFANRLSKDAHRYGMRGMSADPEEYDLADLSSLPEIDNALVVFCMATYGEGDPTDNAQDFYDWLQETDVDLSGVKFAVFGLGNKTYEHFNAMGKYVDKRLEQLGAQRIFELGLGDDDGNLEEDFITWREQFWPAVCEHFGVEATGEESSIRQYELVVHTDIDAAKVYMGEMGRLKSYENQKPPFDAKNPFLAAVTTNRKLNQGTERHLMHLELDISDSKIRYESGDHVAVYPANDSALVNQLGKILGADLDVVMSLNNLDEESNKKHPFPCPTSYRTALTYYLDITNPPRTNVLYELAQYASEPSEQELLRKMASSSGEGKELYLSWVVEARRHILAILQDCPSLRPPIDHLCELLPRLQARYYSIASSSKVHPNSVHICAVVVEYETKAGRINKGVATNWLRAKEPAGENGGRALVPMFVRKSQFRLPFKATTPVIMVGPGTGVAPFIGFIQERAWLRQQGKEVGETLLYYGCRRSDEDYLYREELAQFHRDGALTQLNVAFSREQSHKVYVQHLLKQDREHLWKLIEGGAHIYVCGDARNMARDVQNTFYDIVAELGAMEHAQAVDYIKKLMTKGRYSLDVWS

SEQ ID NO: 71179 - protein, 75 aa, Homo sapiens
IILFSMMLMTGMPQLTSKEDIEYIRDALTVGKNEEDAKKYFLDQIEVCRDKGWTVQFNWFLHLVLGIKQGEKHSA

SEQ ID NO: 71180 - protein, 41 aa, Homo sapiens
LAILLYLLRLRRIHRRTPRSSSAAALWMEEGLPAQNAPGTL

SEQ ID NO: 71181 - protein, 30 aa, Homo sapiens
VASSLFLMVMYFFFRVRSRRWKVKHHHPAV

SEQ ID NO: 71182 - protein, 45 aa, Homo sapiens
IVLLLLQLMGMTARNLNEIDLPVRLPVFSIFEKFHVMSPKQRSYH

SEQ ID NO: 71183 - protein, 98 aa, Homo sapiens
MPAILLLRFFANAFTLTPYNGTEALVWLFHQKPESVNPLIKYLSATTGFGRNYIMTQKMDLDEDTAEKFYQKLLELEKHIRVTIQKTDNQARLSGSCL

SEQ ID NO: 71184 - protein, 25 aa, Homo sapiens
MLLLYTKISNLFWIHMFLTMAVPGN

SEQ ID NO: 71185 - protein, 18 aa, Homo sapiens
LGCWNAWALLASSLAGLH

SEQ ID NO: 71186 - protein, 20 aa, Homo sapiens
VDWLGALVHVACVVQLLSTL

SEQ ID NO: 71187 - protein, 14 aa, Homo sapiens
LPFAFAFFTFAFST

SEQ ID NO: 71188 - protein, 76 aa, Homo sapiens
LLLTVWLLVGFPLTVIGGIFGKNNASPFDAPCRTKNIAREIPPQPWYKSTVIHMTVGGFLPFRYPPFIPWLLLSGS

SEQ ID NO: 71189 - protein, 13 aa, Homo sapiens
KFLLQVFWCFALL

SEQ ID NO: 71190 - protein, 22 aa, Homo sapiens
KILLAIMMKLRRIMNMMSLLLN

SEQ ID NO: 71191 - protein, 46 aa, Homo sapiens
LALGFSLAVYGASYHSMSSMARAAFSEDGALMDGGMDLNMEQGMAE

SEQ ID NO: 71192 - protein, 1220 aa, Homo sapiens
VGQGAGLLGPAVVTAAVVLLLSGVGPAHGSEDIVVGCGGFVKSDVEINYSLIEIKLYTKHGTLKYQTDCAPNNGYFMIPLYDKGDFILKIEPPLGWSFEPTTVELHVDGVSDICTKGGDINFVFTGFSVNGKVLSKGQPLGPAGVQVSLRNTGTEAKIQSTVTQPGGKFAFFKVLPGDYEILATHPTWALKEASTTVRVTNSNANAASPLIVAGYNVSGSVRSDGEPMKGVKFLLFSSLVTKEDVLGCNVSPVPGFQPQDESLVYLCYTVSREDGSFSFYSLPSGGYTVIPFYRGERITFDVAPSRLDFTVEHDSLKIEPVFHVMGFSVTGRVLNGPEGDGVPEAVVTLNNQIKVKTKADGSFRLENITTGTYTIHAQKEHLYFETVTIKIAPNTPQLADIVATGFSVCGRISIIRFPDTVKQMNKYKVVLSSQDKDKSLVTVETDAHGSFCFKAKPGTYKVQVMVPEAETRAGLTLKPQTFPLTVTDRPVMDVAFVQFLASVSGKVSCLDTCGDLLVTLQSLSRQGEKRSLQLSGKVNAMTFTFDNVLPGKYKISIMHEDWCWKNKSLEVEVLEDDVSAVEFRQTGYMLRCSLSHAITLEFYQDGNGRENVGIYNLSKGVNRFCLSKPGVYKVTPRSCHRFEQAFYTYDTSSPSILTLTAIRHHVLGTITTDKMMDVTVTIKSSIDSEPALVLGPLKSVQELRREQQLAEIEARRQEREKNGNEEGEERMTKPPVQEMVDELQGPFSYDFSYWARSGEKITVTPSSKELLFYPPSMEAVVSGESCPGKLIEIHGKAGLFLEGQIHPELEGVEIVISEKGASSPLITVFTDDKGAYSVGPLHSDLEYTVTSQKEGYVLTAVEGTIGDFKAYALAGVSFEIKAEDDQPLPGVLLSLSGGLFRSNLLTQDNGILTFSNLSPGQYYFKPMMKEFRFEPSSQMIEVQEGQNLKITITGYRTAYSCYGTVSSLNGEPEQGVAMEAVGQNDCSIYGEDTVTDEEGKFRLRGLLPGCVYHVQLKAEGNDHIERALPHHRVIEVGNNDIDDVNIIVFRQINQFDLSGNVITSSEYLPTLWVKLYKSENLDNPIQTVSLGQSLFFHFPPLLRDGENYVVLLDSTLPRSQYDYILPQVSFTAVGYHKHITLIFNPTRKLPEQDIAQGSYIALPLTLLVLLAGYNHDKLIPLLLQLTSRLQGVGALGQAASDNSGPEDAKRQAKKQKTRRT

SEQ ID NO: 71193 - protein, 1220 aa, Homo sapiens; identical to SEQ ID NO: 71192

SEQ ID NO: 71194 - protein, 21 aa, Homo sapiens
MSVILVGAFVGWTLFFQQNAL

SEQ ID NO: 71195 - protein, 787 aa, Homo sapiens
KPPRPARSTAEDSSTPRDMLGLRPPLLALVGLLSLGCVLSQECTKFKVSSCRECIESGPGCTWCQKLNFTGPGDPDSIRCDTRPQLLMRGCAADDIMDPTSLAETQEDHNGGQKQLSPQKVTLYLRPGQAAAFNVTFRRAKGYPIDLYYLMDLSYSMLDDLRNVKKLGGDLLRALNEITESGRIGFGSFVDKTVLPFVNTHPDKLRNPCPNKEKECQPPFAFRHVLKLTNNSNQFQTEVGKQLISGNLDAPEGGLDAMMQVAACPEEIGWRNVTRLLVFATDDGFHFAGDGKLGAILTPNDGRCHLEDNLYKRSNEFDYPSVGQLAHKLAENNIQPIFAVTSRMVKTYEKLTEIIPKSAVGELSEDSSNVVHLIKNAYNKLSSRVFLDHNALPDTLKVTYDSFCSNGVTHRNQPRGDCDGVQINVPITFQVKVTATECIQEQSFVIRALGFTDIVTVQVLPQCECRCRDQSRDRSLCHGKGFLECGICRCDTGYIGKNCECQTQGRSSQELEGSCRKDNNSIICSGLGDCVCGQCLCHTSDVPGKLIYGQYCECDTINCERYNGQVCGGPGRGLCFCGKCRCHPGFEGSACQCERTTEGCLNPRRVECSGRGRCRCNVCECHSGYQLPLCQECPGCPSPCGKYISCAECLKFEKGPFGKNCSAACPGLQLSNNPVKGRTCKERDSEGCWVAYTLEQQDGMDRYLIYVDESRECVAGPNIAAIVGGTVAGIVLIGILLLVIWKALIHLSDLREYRRFEKEKLKSQWNNDNPLFKSATTTVMNPKFAES

SEQ ID NO: 71196 - protein, 216 aa, Homo sapiens
LHWMAVTAAVLFEMVQGWHRKATSCGFLLVPVLEGPFALPSYLYGDPLRAQLFIPLNISCLLKEGSEHLFDSFEPETYWDRMHLFQEAIAHRFGFVQDKYSASAFNFPAENKPQYIHVTGTVFLQLPYSKRKFSGQQRRRRNSTSSTNQNMFCEERVGYNWAYNTMLTKTWRSSATGDEKFADRLLKDFTDFCINRDNRLVTFWTSCLEKMHASAP

SEQ ID NO: 71197 - protein, 25 aa, Homo sapiens
KLNRTLSFFLSGYLSSLEWVLVHIC

SEQ ID NO: 71198 - protein, 24 aa, Homo sapiens
ITTQGLLKGKIVLLFLNSLLSSPP

SEQ ID NO: 71199 - protein, 158 aa, Homo sapiens
MHGIDPVVLVLMVGVVMFTLGFAGCVGALRENICLLNFNQCCGAYGPEDWDLNVYFNCSGASYSREKCGVPFSCCVPDPAQKVVNTQCGYDVRIQLKSKWDESIFTKGCIQALESWLPRNIYIVAGVFIAISLLQIFGIFLARTLISDIEAVKAGHHF

SEQ ID NO: 71200 - protein, 16 aa, Homo sapiens
MVILSLYLLILVTRTL

SEQ ID NO: 71201 - protein, 65 aa, Homo sapiens
IPGPPFLFGACSVLLALLVALFIPEHTNLSLRSSSWRKHCGSHSHPHNTQAPGEAKEPLLQDTNV

SEQ ID NO: 71202 - protein, 18 aa, Homo sapiens
LTGSVLFFFFLSQDYGAE

SEQ ID NO: 71203 - protein, 35 aa, Homo sapiens
VGITKAAPILFASAALALGSSLALKLPETRGQVLQ

SEQ ID NO: 71204 - protein, 15 aa, Homo sapiens
RKSRRKKKIIFSILL

SEQ ID NO: 71205 - protein, 80 aa, Homo sapiens
LLVFNFLLILTILTIWLFKNHRFRFLHETGGAMVYDKPPKFAMSREQMSQSCSHTAHNASLLTDAGPLSCGESRASCLFL

SEQ ID NO: 71206 - protein, 21 aa, Homo sapiens
RLICWILMQFITSFMIFSPML

SEQ ID NO: 71207 - protein, 12 aa, Homo sapiens
MVISYSVSALVF

SEQ ID NO: 71208 - protein, 30 aa, Homo sapiens
MYLVSAISLHPSMTLLSMSLIFLARKPSAV

SEQ ID NO: 71209 - protein, 30 aa, Homo sapiens
ILFIGILFIILRKRQGSRGAMGHYVLAERE

SEQ ID NO: 71210 - protein, 16 aa, Homo sapiens
IFTCLTVALGFYRLWI

SEQ ID NO: 71211 - protein, 215 aa, Homo sapiens
VTLLLAVPITVLAVLALVPQDQGGLVTETADPGAQAQQGLGFQKLPEEEPETDLSPGLPAAHLIGAPLKGQGLGWETTKEQAFLTSGTQFSDAEGLALPQDGLYYLYCLVGYRGRAPPGGGDPQGRSVTLRSSLYRAGGAYGPGTPELLLEGAETVTPVLDPARRQGYGPLWYTSVGFGGLVQLRRGERVYVNISHPDMVDFARGKTFFGAVMVG

SEQ ID NO: 71212 - protein, 19 aa, Homo sapiens
LQKQNCSVLVGLLMDFVAV

SEQ ID NO: 71213 - protein, 56 aa, Homo sapiens
IIGPILLCILVVASNIYSAMLVSPTNSVPTPNQTPWPAQPQRTFRDISEDLKSSVG

SEQ ID NO: 71214 - protein, 31 aa, Homo sapiens
MGSWVHNLCIICTFMYLGAGSSSGLQVEPAN

SEQ ID NO: 71215 - protein, 66 aa, Homo sapiens
RLPQSRGLGAGTLLWTTFSLSAGRATQSPFACGWTTRRTTSTRGTIMASPPCTGPAERAALLWLRC

SEQ ID NO: 71216 - protein, 18 aa, Homo sapiens
MQQLLKHHLIVITSLLVL

SEQ ID NO: 71217 - protein, 19 aa, Homo sapiens
KRIIMNLMKMEMIILSMTL

SEQ ID NO: 71218 - protein, 27 aa, Homo sapiens
MILSWLVVLLVSPRFRSFSKTSSMEKN

SEQ ID NO: 71219 - protein, 534 aa, Homo sapiens
LPSCSPALLLLVLGGCLGVFGVAAGTRRPNVVLLLTDDQDEVLGGMTPLKKTKALIGEMGMTFSSAYVPSALCCPSRASILTGKYPHNHHVVNNTLEGNCSSKSWQKIQEPNTFPAILRSMCGYQTFFAGKYLNEYGAPDAGGLEHVPLGWSYWYALEKNSKYYNYTLSINGKARKHGENYSVDYLTDVLANVSLDFLDYKSNFEPFFMMIATPAPHSPWTAAPQYQKAFQNVFAPRNKNFNIHGTNKHWLIRQAKTPMTNSSIQFLDNAFRKRWQTLLSVDDLVEKLVKRLEFTGELNNTYIFYTSDNGYHTGQFSLPIDKRQLYEFDIKVPLLVRGPGIKPNQTSKMLVANIDLGPTILDIAGYDLNKTQMDGMSLLPILRGASNLTWRSDVLVEYQGEGRNVTDPTCPSLSPGVSQCFPDCVCEDAYNNTYACVRTMSALWNLQYCEFDDQEVFVEVYNLTADPDQITNIAKTIDPELLGKMNYRLMMLQSCSGPTCRTPGVFDPGYRFDPRLMFSNRGSVRTRRFSKHLL

SEQ ID NO: 71220 - protein, 44 aa, Homo sapiens
LRPSLLPLHLLLLLLLSAAVCRAEAGLETESPVRTLQVETLVRR

SEQ ID NO: 71221 - protein, 25 aa, Homo sapiens
LLHLWVMIVLLTYTPEMHHDQPYGK

SEQ ID NO: 71222 - protein, 39 aa, Homo sapiens
ILVLMGTWAFLAAGGSCRSLKLCLLCQDKNFLLYNQRSR

SEQ ID NO: 71223 - protein, 12 aa, Homo sapiens
IEIIIVPLSGLL

SEQ ID NO: 71224 - protein, 323 aa, Homo sapiens
VAFVLLLYMVSPLISPKPLALPGAHVVVTGGSSGIGKCIAIECYKQGAFITLVARNEDKLLQAKKEIEMHSINDKQVVLCISVDVSQDYNQVENVIKQAQEKLGPVDMLVNCAGMAVSGKFEDLEVSTFERLMSINYLGSVYPSRAVITTMKERRVGRIVFVSSQAGQLGLFGFTAYSASKFAIRGLAEALQMEVKPYNVYITVAYPPDTDTPGFAEENRTKPLETRLISETTSVCKPEQVAKQIVKDAIQGNFNSSLGSDGYMLSALTCGMAPVTSITEGLQQVVTMGLFRTIALFYLGSFDSIVRRCMMQREKSENADKTA

SEQ ID NO: 71225 - protein, 34 aa, Homo sapiens
VVYCPPLLTSSFSLALSVFLFSPSSLPLAITSGK

SEQ ID NO: 71226 - protein, 79 aa, Homo sapiens
VYLVLLMGLLEDYFVPLHHFYLTPESFDQKVHNVSFAFELMLDGGLKKPKARPEDVVNLDLKSTLRVLYNLFTKYKNVE

SEQ ID NO: 71227 - protein, 31 aa, Homo sapiens
VSIFLLLTGPTYLLFKLSPRLGWGPTGPVCC

SEQ ID NO: 71228 - protein, 17 aa, Homo sapiens
MEILILFLIFDNFLLKV

SEQ ID NO: 71229 - protein, 77 aa, Homo sapiens
MVAFLGASAVTASTGLLWKRAHAESPPCVDNLKSDIGDKGKNKDEGDVCNHEKKTADLAPHPEEKKKKRSGFRDRKV

SEQ ID NO: 71230 - protein, 65 aa, Homo sapiens
MGLSTVPDLLLPLVLLELLVGIYPSGVIGLVPHLGDREKRDSVCPQGKYIHPQNNSICCTKCHKA

SEQ ID NO: 71231 - protein, 195 aa, Homo sapiens
MGTALKLLLGAGAVAYGVRESVFTVEGGHRAIFFNRIGGVQQDTILAEGLHFRIPWFQYPIIYDIRARPRKISSPTGSKDLQMVNISLRVLSRPNAQELPSMYQRLGLDYEERVLPSIVNEVLKSVVAKFNASQLITQRAQVSLLIRRELTERAKDFSLILDDVAITELSFSREYTAAVEAKQVGESQEPWGEGF

SEQ ID NO: 71232 - protein, 16 aa, Homo sapiens
MEFFRSGVLLIRVTLI

SEQ ID NO: 71233 - protein, 126 aa, Homo sapiens
MRNRPVRAAAVSTLWALITVPASPHWCWMARSAAASPTRARASMTIWECAGRKWGLTSCAATLGWTVRPPTQSAAACMERPGAWTAPSALRRTQMTSRPCAMCYAPPHIAPRDQVALDSPTSTAQT

SEQ ID NO: 71234 - protein, 251 aa, Homo sapiens
MVFGVIAMFSSFFLLGKTLMQTLAQMMADSPSSYSSSSSSSSSSSSSSSSSSSSSSSLHNEQVLQVVVPGINLPVNQLTYFFTAVLISGVVHEIGHGIAAIREQVRFNGFGIFLFIIYPGAFVDLFTTHLQLISPVQQLRIFCAGIWHNFVLALLGILALVLLPVILLPFYYTGVGVLITEVAEDSPAIGPRGLFVGDLVTHLQDCPVTNVQDWNECLDTIAYEPQIGYCISASTLQQLSFPVRGVYISSI

SEQ ID NO: 71235 - protein, 440 aa, Homo sapiens
MVFGVIAMFSSFFLLGKTLMQTLAQMMADSPSSYSSSSSSSSSSSSSSSSSSSSSSSLHNEQVLQVVVPGINLPVNQLTYFFTAVLISGVVHEIGHGIAAIREQVRFNGFGIFLFIIYPGAFVDLFTTHLQLISPVQQLRIFCAGIWHNFVLALLGILALVLLPVILLPFYYTGVGVLITEVAEDSPAIGPRGLFVGDLVTHLQDCPVTNVQDWNECLDTIAYEPQIGYCISASTLQQLSFPVRAYKRLDGSTECCNNHSLTDVCFSYRNNFNKRLHTCLPARKAVEATQVCRTNKDCKKSSSSSFCIIPSLETHTRLIKVKHPPQIDMLYVGHPLHLHYTVSITSFIPRFNFLSIDLPVVVETFVKYLISLSGALAIVNAVPCFALDGQWILNSFLDATLTSVIGDNDVKDLIGFFILLGGSVLLAANVTLGLWMVTAR

SEQ ID NO: 71236 - protein, 27 aa, Homo sapiens
LIKILLESALLVSYLCQISSWETAVTT

SEQ ID NO: 71237 - protein, 9 aa, Homo sapiens
IWLWIWLFQ

SEQ ID NO: 71238 - protein, 203 aa, Homo sapiens
IFAVTFLLALVGAVLYLYPASRQAAGIPGITPTEEKDGNLPDIVNSGSLHEFLVNLHERYGPVVSFWFGRRLVVSLGTVDVLKQHINPNKTSDPFETMLKSLLRYQSGGGSVSENHMRKKLYENGVTDSLKSNFALLLKLSEELLDKWLSYPETQHVPLSQHMLGFAMKSVTQMVMGSTFEDDQEVIRFQKNHGTPSCNWSLF

SEQ ID NO: 71239 - protein, 31 aa, Homo sapiens
VGIFFFFFVWRNGDTKTHLAAEVRRSFTKDV

SEQ ID NO: 71240 - protein, 160 aa, Homo sapiens
ILVGSSLGGWLMLHAAIARPEKVVALIGVATAADTLVTKFNQLPVELKKEVEMKGVWSMPSKYSEEGVYNVQYSFIKEAEHHCLLHSPIPVNCPIRLLHGMKDDIVPWHTSMQVADRVLSTDVDVILRKHSDHRMREKADIQLLVYTIDDLIDKLSTIVN

SEQ ID NO: 71241 - protein, 27 aa, Homo sapiens
LDCYVSSGTLLLIACLCIVANGGICSS

SEQ ID NO: 71242 - protein, 18 aa, Homo sapiens
MLVRTAPRWIFLQLLVWW

SEQ ID NO: 71243 - protein, 40 aa, Homo sapiens
VPDFFFFNFCILCFDSLRLGLCLCEVEEPGATQQQLIFET

SEQ ID NO: 71244 - protein, 43 aa, Homo sapiens
IIAGILLLLALVAILWKLGFFKRKYEKMTKNPDEIDETTELSS

SEQ ID NO: 71245 - protein, 16 aa, Homo sapiens
KRSYFSFYFAACLLPV

SEQ ID NO: 71246 - protein, 450 aa, Homo sapiens
LLLLLLLPLLLHESPQPPALRVVATSSDRNFMNKHQKPVLTGQRFKTRKRDEKEKFEPTVFRDTLVQGLNEAGDDLEAVAKFLDSTGSRLDYRRYADTLFDILVAGSMLAPGGTRIDDGDKTKMTNHCVFSANEDHETIRNYAQVFNKLIRRYKYLEKAFEDEMKKLLLFLKAFSETEQTKLAMLSGILLGNGTLPATILTSLFTDSLVKEGIAASFAVKLFKAWMAEKDANSVTSSLRKANLDKRLLELFPVNRQSVDHFAKYFTDAGLKELSDFLRVQQSLGTRKELQKELQERLSQECPIKEVVLYVKEEMKRNDLPETAVIGLLWTCIMNAVEWNKKEELVAEQALKHLKQYAPLLAVFSSQGQSELILLQKVQEYCYDNIHFMKAFQKIVVLFYKADVLSEEAILKWYKEAHVAKGKSVFLDQMKKFVEWLQNAEEESESEGEEN

SEQ ID NO: 71247 - protein, 12 aa, Homo sapiens
IFSIFIIIGFYI

SEQ ID NO: 71248 - protein, 18 aa, Homo sapiens
IVLFFLLAVHFGGYYKEI

SEQ ID NO: 71249 - protein, 27 aa, Homo sapiens
KGAWSNVLRGMGGAFVLVLCDEIKKYT

SEQ ID NO: 71250 - protein, 48 aa, Homo sapiens
IYLMVQWKNWPESLEVWVLVLAVPLTHCDLGILCCEDISQVLHVSQQI

SEQ ID NO: 71251 - protein, 2406 aa, Homo sapiens
IPLVLFFILLGLRQKKPTISVKEVAFYTAAPLTSAGILPVMQSLCPDGQRDEFGFLQYANSTVTQLLERLDRVVEEGNLFDPARPSLGSELEALRQHLEALSAGPGTSGSHLDRSTVSSFSLDSVARNPQELWRFLTQNLSLPNSTAQALLAARVDPPEVYHLLFGPSSALDSQSGLHKGQEPWSRLGGNPLFRMEELLLAPALLEQLTCTPGSGELGRILTVPESQKGALQGYRDAVCSGQAAARARRFSGLSAELRNQLDVAKVSQQLGLDAPNGSDSSPQAPPPRRLQALLGDLLDAQKVLQDVDVLSALALLLPQGACTGRTPGPPASGAGGAANGTGAGAVMGPNATAEEGAPSAAALATPDTLQGQCSAFVQLWAGLQPILCGNNRTIEPEALRRGNMSSLGFTSKEQRNLGLLVHLMTSNPKILYAPAGSEVDRVILKANETFAFVGNVTHYAQVWLNISAEIRSFLEQGRLQQHLRWLQQYVAELRLHPEALNLSLDELPPALRQDNFSLPSGMALLQQLDTIDNAACGWIQFMSKVSVDIFKGFPDEESIVNYTLNQAYQDNVTVFASVIFQTRKDGSLPPHVHYKIRQNSSFTEKTNEIRRAYWRPGPNTGGRFYFLYGFVWIQDMMERAIIDTFVGHDVVEPGSYVQMFPYPCYTRDDFLFVIEHMMPLCMVISWVYSVAMTIQHIVAEKEHRLKEVMKTMGLNNAVHWVAWFITGFVQLSISVTALTAILKYGQVLMHSHVVIIWLFLAVYAVATIMFCFLVSVLYSKAKLASACGGIIYFLSYVPYMYVAIREEVAHDKITAFEKCIASLMSTTAFGLGSKYFALYEVAGVGIQWHTFSQSPVEGDDFNLLLAVTMLMVDAVVYGILTWYIEAVHPGMYGLPRPWYFPLQKSYWLGSGRTEAWEWSWPWARTPRLSVMEEDQACAMESRRFEETRGMEEEPTHLPLVVCVDKLTKVYKDDKKLALNKLSLNLYENQVVSFLGHNGAGKTTTMSILTGLFPPTSGSATIYGHDIRTEMDEIRKNLGMCPQHNVLFDRLTVEEHLWFYSRLKSMAQEEIRREMDKMIEDLELSNKRHSLVQTLSGGMKRKLSVAIAFVGGSRAIILDEPTAGVDPYARRAIWDLILKYKPGRTILLSTHHMDEADLLGDRIAIISHGKLKCCGSPLFLKGTYGDGYRLTLVKRPAEPGGPQEPGLASSPPGRAPLSSCSELQVSQFIRKHVASCLLVSDTSTELSYILPSEAAKKGAFERLFQHLERSLDALHLSSFGLMDTTLEEVFLKVSEEDQSLENSEADVKESRKDVLPGAEGPASGEGHAGNLARCSELTQSQASLQSASSVGSARGDEGAGYTDVYGDYRPLFDNPQDPDNVSLQEVEAEALSRVGQGSRKLDGGWLKVRQFHGLLVKRFHCARRNSKALFSQILLPAFFVCVAMTVALSVPEIGDLPPLVLSPSQYHNYTQPRGNFIPYANEERREYRLRLSPDASPQQLVSTFRLPSGVGATCVLKSPANGSLGPTLNLSSGESRLLAARFFDSMCLESFTQGLPLSNFVPPPPSPAPSDSPASPDEDLQAWNVSLPPTAGPEMWTSAPSLPRLVREPVRCTCSAQGTGFSCPSSVGGHPPQMRVVTGDILTDITGHNVSEYLLFTSDRFRLHRYGAITFGNVLKSIPASFGTRAPPMVRKIAVRRAAQVFYNNKGYHSMPTYLNSLNNAILRANLPKSKGNPAAYGITVTNHPMNKTSASLSLDYLLQGTDVVIAIFIIVAMSFVPASFVVFLVAEKSTKAKHLQFVSGCNPIIYWLANYVWDMLNYLVPATCCVIILFVFDLPAYTSPTNFPAVLSLFLLYGWSITPIMYPASFWFEVPSSAYVFLIVINLFIGITATVATFLLQLFEHDKDLKVVNSYLKSCFLIFPNYNLGHGLMEMAYNEYINEYYAKIGQFDKMKSPFEWDIVTRGLVAMAVEGVVGFLLTIMCQYNFLRRPQRMPVSTKPVEDDVDVASERQRVLRGDADNDMVKIENLTKVYKSRKIGRILAVDRLCLGVRPGECFGLLGVNGAGKTSTFKMLTGDESTTGGEAFVNGHSVLKELLQVQQSLGYCPQCDALFDELTAREHLQLYTRLRGISWKDEARVVKWALEKLELTKYADKPAGTYSGGNKRKLSTAIALIGYPAFIFLDEPTTGMDPKARRFLWNLILDLIKTGRSVVLTSHSMEECEALCTRLAIMVNGRLRCLGSIQHLKNRFGDGYMITVRTKSSQSVKDVVRFFNRNFPEAMLKERHHTKVQYQLKSEHISLAQVFSKMEQVSGVLGIEDYSVSQTTLDNVFVNFAKKQSDNLEQQETEPPSALQSPLGCLLSLLRPRSAPTELRALVADEPEDLDTEDEGLISFEEERAQLSFNTDTLC

SEQ ID NO: 71252 - protein, 15 aa, Homo sapiens
IIAISFLLLIVIQKI

SEQ ID NO: 71253 - protein, 51 aa, Homo sapiens
VRLKIASLLGLLSKTAGFSPDCIMDDAINILQNEISSSPSSTAGYFACNWH

SEQ ID NO: 71254 - protein, 20 aa, Homo sapiens
TTYFSVALAVFCCCSCSDRL

SEQ ID NO: 71255 - protein, 30 aa, Homo sapiens
IKQFRPLALIVLAGVVCSRLKRWSEGERRK

SEQ ID NO: 71256 - protein, 18 aa, Homo sapiens
KLKKIMYVLVMMSLKVYE

SEQ ID NO: 71257 - protein, 35 aa, Homo sapiens
IVFFFSRRGGKLSHYRGPAMLCIWACCMSCCRCLH

SEQ ID NO: 71258 - protein, 21 aa, Homo sapiens
KIQQMLFILSFWLRSVILCKA

SEQ ID NO: 71259 - protein, 515 aa, Homo sapiens
LPPLGHGWVGGLGLGLGLALGVKLAGGLRGAAPAQSPAAPDPEASPLAEPPQEQSLAPWSPQTPAPPCSRCFARAIESSRDLLHRIKDEVGAPGIVVGVSVDGKEVWSEGLGYADVENRVPCKPETVMRIASISKSLTMVALAKLWEAGKLDLDIPVQHYVPEFPEKEYEGEKVSVTTRLLISHLSGIRHYEKDIKKVKEEKAYKALKMMKENVAFEQEKEGKSNEKNDFTKFKTEQENEAKCRNSKPGKKKNDFEQGELYLREKFENSIESLRLFKNDPLFFKPGSQFLYSTFGYTLLAAIVERASGCKYLDYMQKIFHDLDMLTTVQEENEPVIYNRARFYVYNKKKRLVNTPYVDNSYKWAGGGFLSTVGDLLKFGNAMLYGYQVGLFKNSNENLLPGYLKPETMVMMWTPVPNTEMSWDKEGKYAMAWGVVERKQTYGSCRKQRHYASHTGGAVGASSVLLVLPEELDTETINNKVPPRGIIVSIICNMQSVGLNSTALKIALEFDKDRSD

SEQ ID NO: 71260 - protein, 32 aa, Homo sapiens
IMHLLSVGSILQLHAGVVPDLLWAAHHACPRD

SEQ ID NO: 71261 - protein, 32 aa, Homo sapiens
VMFAYFLTGSGVILAHCNLRLPGSSDSPASAS

SEQ ID NO: 71262 - protein, 15 aa, Homo sapiens
LLMFLLWLCLFSVLL

SEQ ID NO: 71263 - protein, 29 aa, Homo sapiens
LALQIHFMKVVFLRLILLSQKIIPSDLLK

SEQ ID NO: 71264 - protein, 31 aa, Homo sapiens
TLLPLLFSLLPVFFPPPDLARPPFQSGRAGA

SEQ ID NO: 71265 - protein, 158 aa, Homo sapiens
KKWIHCFENVIALIYLASLSEYDQCLEENNQENRMKESLALFGTILELPWFKSTSVILFLNKTDILEEKIPTSHLATYFPSFQGPKQDAEAAKRFILDMYTRMYTGCVDGPEGSKKGARSRRLFSHYTCATDTQNIRKVFKDVRDSVLARYLDEINLL

SEQ ID NO: 71266 - protein, 55 aa, Homo sapiens
LAPAWSPTTYLLLLLLLSSGLSGTQDCSFQHSPISSDFAVKIRELPGLILFSPAV

SEQ ID NO: 71267 - protein, 17 aa, Homo sapiens
ITLLMTARLWGGTLLWT

SEQ ID NO: 71268 - protein, 319 aa, Homo sapiens
LRPPLPPLCFFLLLLAAAGARAGGYETCPTVQPNMLNVHLLPHTHDDVGWLKTVDQYFYGIKNDIQHAGVQYILDSVISALLADPTRRFIYVEIAFFSRWWHQQTNATQEVVRDLVRQGRLEFANGGWVMNDEAATHYGAIVDQMTLGLRFLEDTFGNDGRPRVAWHIDPFGHSREQASLFAQMGFDGFFFGRLDYQDKWVRMQKLEMEQVWRASTSLKPPTADLFTGVLPNGYNPPRNLCWDVLCVDQPLVEDPRSPEYNAKELVDYFLNVATAQGRYYRTNHTVMTMGSDFQYENANMWFKNLDKLIRLVNAQVSET

SEQ ID NO: 71269 - protein, 53 aa, Homo sapiens
VAVSGSLSVLLDSIICALGPLACLTTQLPELNGCPKQVLSNTLDNIAYIMPGL

SEQ ID NO: 71270 - protein, 21 aa, Homo sapiens
VIKLLWKYKKLFLFQMLWIQT

SEQ ID NO: 71271 - protein, 81 aa, Homo sapiens
MFLNSVFHFMWVAVLLMCQMYQISCLGITTNERMNARRYKHFKVTTTSIESPFKYVHIYKFNILPGHKNFLTNQTLLLSDM

SEQ ID NO: 71272 - protein, 1135 aa, Homo sapiens
MIIVLQVLIPISLYVSIEIVKACQVYFINQDMQLYDEETDSQLQCRALNITEDLGQIQYIFSDKTGTLTENKMVFRRCTVSGVEYSHDANAQRLARYQEADSEEEEVVPRGGSVSQRGSIGSHQSVRVVHRTQSTKSHRRTGSRAEAKRASMLSKHTAFSSPMEKDITPDPKLLEKVSECDKSLAVARHQEHLLAHLSPELSDVFDFFIALTICNTVVVTSPDQPRTKVRVRFELKSPVKTIEDFLRRFTPSCLTSGCSSIGSLAANKSSHKLGSSFPSTPSSDGMLLRLEERLGQPTSAIASNGYSSQADNWASELAQEQESERELRYEAESPDEAALVYAARAYNCVLVERLHDQVSVELPHLGRLTFELLHTLGFDSVRKRMSVVIRHPLTDEINVYTKGADSVVMDLLQPCSSVDARGRHQKKIRSKTQNYLNVYAAEGLRTLCIAKRVLSKEEYACWLQSHLEAESSLENSEELLFQSAIRLETNLHLLGATGIEDRLQDGVPETISKLRQAGLQIWVLTGDKQETAVNIAYACKLLDHDEEVITLNATSQEACAALLDQCLCYVQSRGLQRAPEKTKGKVSMRFSSLCPPSTSTASGRRPSLVIDGRSLAYALEKNLEDKFLFLAKQCRSVLCCRSTPLQKSMVVKLVRSKLKAMTLAIGDGANDVSMIQVADVGVGISGQEGMQAVMASDFAVPKFRYLERLLILHGHWCYSRLANMVLYFFYKNTMFVGLLFWFQFFCGFSASTMIDQWYLIFFNLLFSSLPPLVTGVLDRDVPANVLLTNPQLYKSGQNMEEYRPRTFWFNMADAAFQSLVCFSIPYLAYYDSNVDLFTWGTPIVTIALLTFLLHLGIETKTWTWLNWITCGFSVLLFFTVALIYNASCATCYPPSNPYWTMQALLGDPVFYLTCLMTPVAALLPRLFFRSLQGRVFPTQLQLARQLTRKSPRRCSAPKETFAQGRLPKDSGTEHSSGRTVKTSVPLSQPSWHTQQPVCSLEASGEPSTVDMSMPVREHTLLEGLSAPAPMSSAPGEAVLRSPGGCPEESKVRAASTGRVTPLSSLFSLPTFSLLNWISSWSLVSRLGSVLQFSRTEQLADGQAGRGLPVQPHSGRSGLQGPDHRLLIGASSRRSQ

SEQ ID NO: 71273 - protein, 30 aa, Homo sapiens
MGIVTWLLSSFMSSAEESVSARTTILLSSG

SEQ ID NO: 71274 - protein, 132 aa, Homo sapiens
MALLLTTVIALTCLGGFASPGPVPPSTALRELIEELVNITQNQKAPLCNGSMVWSINLTAGMYCAALESLINVSGCSAIEKTQRMLSGFCPHKVSAGQFSSLHVRDTKIEVAQFVKDLLLHLKKLFREGQFN

SEQ ID NO: 71275 - protein, 62 aa, Homo sapiens
LLLWLSLPVRLPSFVVSQRCAGLLLAALRIQGVGCQVQGLRLGKRRETIALPRPASAPVHPG

SEQ ID NO: 71276 - protein, 16 aa, Homo sapiens
IFQFILCLFSGQSVTL

SEQ ID NO: 71277 - protein, 27 aa, Homo sapiens
ILFASAALALGSSLALKLPETRGQVLQ

SEQ ID NO: 71278 - protein, 289 aa, Homo sapiens
LLCLFILAILLCSLALGSVTVHSSEPEVRIPENNPVKLSCAYSGFSSPRVEWKFDQGDTTRLVCYNNKITASYEDRVTFLPTGITFKSVTREDTGTYTCMVSEEGGNSYGEVKVKLIVLVPPSKPTVNIPSSATIGNRAVLTCSEQDGSPPSEYTWFKDGIVMPTNPKSTRAFSNSSYVLNPTTGELVFDPLSASDTGEYSCEARNGYGTPMTSNAVRMEAVERNVGVIVAAVLVTLILLGILVFGIWFAYSRGHFDRTKKGTSSKKVIYSQPSARSEGEFKQTSSFLV

SEQ ID NO: 71279 - protein, 24 aa, Homo sapiens
VISCLLCLPWFLSPHDWVYFLSGC

SEQ ID NO: 71280 - protein, 44 aa, Homo sapiens
VALLVGLSWLFLSYRPGMDLSEELMFSSEVEEYPDKEKEIKASS

SEQ ID NO: 71281 - protein, 41 aa, Homo sapiens
RMNTVNILSTMLEVLYLWLIMARTPMDLSSSSPMANSHIWT

SEQ ID NO: 71282 - protein, 133 aa, Homo sapiens
RKNHSEKKSVLMLIICSSAVRALELIRSMTAFRGDGKVIKLFAKHIKVQAQVKLLEKRVVHLGVGTPGRIKELVKQGGLNLSPLKFLVFDWNWRDQKLRRMMDIPEIRKEVFELLEMGVLSLCKSESLKLGLF

SEQ ID NO: 71283 - protein, 9 aa, Homo sapiens
VKVALLLGL

SEQ ID NO: 71284 - protein, 12 aa, Homo sapiens
RKFSLLYMCLCA

SEQ ID NO: 71285 - protein, 57 aa, Homo sapiens
LALVIFYLTLIIFTCKFARLQSIFPDFSKAGMERAFLPVTSPNKHLGLVTPHKTELV

SEQ ID NO: 71286 - protein, 28 aa, Homo sapiens
ISLFSLTPTFLFALLSLSHILETVFNTH

SEQ ID NO: 71287 - protein, 50 aa, Homo sapiens
VPVGLIFVVFTIHFYRSLVRHKTERHNREIEELHKLKVQLDGHERSLQVL

SEQ ID NO: 71288 - protein, 321 aa, Homo sapiens
RKDLIIMDLRQFLMCLSLCTAFALSKPTEKKDRVHHEPQLSDKVHNDAQSFDYDHDAFLGAEEAKTFDQLTPEESKERLGKIVSKIDGDKDGFVTVDELKDWIKFAQKRWIYEDVERQWKGHDLNEDGLVSWEEYKNATYGYVLDDPDPDDGFNYKQMMVRDERRFKMADKDGDLIATKEEFTAFLHPEEYDYMKDIVVQETMEDIDKNADGFIDLEEYIGDMYSHDGNTDEPEWVKTEREQFVEFRDKNRDGKMDKEETKDWILPSDYDHAEAEARHLVYESDQNKDGKLTKEEIVDKYDLFVGSQATDFGEALVRHDEF

SEQ ID NO: 71289 - protein, 367 aa, Homo sapiens
LHLGVTLVYYLAGRDLSRLPQLVGVSTPLQGGSNSAAAIGQSSGELRTGGARPPPPLGASSQPRPGGDSSPVVDSGPGPASNLTSVPVPHTTALSLPACPEESPLLVGPMLIEFNMPVDLELVAKQNPNVKMGGRYAPRDCVSPHKVAIIIPFRNRQEHLKYWLYYLHPVLQRQQLDYGIYVINQAGDTIFNRAKLLNVGFQEALKDYDYTCFVFSDVDLIPMNDHNAYRCFSQPRHISVAMDKFGFSLPYVQYFGGVSALSKQQFLTINGFPNNYWGWGGEDDDIFNRLVFRGMSISRPNAVVGRCRMIRHSRDKKNEPNPQRFDRIAHTKETMLSDGLNSLTYQVLDVQRYPLYTQITVDIGTPS

SEQ ID NO: 71290 - protein, 45 aa, Homo sapiens
VPFFFFAAICLVSLVFTGCCVPETKGRSLEQIESFFRTGRRSFLR

SEQ ID NO: 71291 - protein, 281 aa, Homo sapiens
RWDALMAGPAALSAAAAAALAAALLLLRREDPGPGAGPSMAETEALSKLREDFRMQNKSVFILGASGETGRVLLKEILEQGLFSKVTLIGRRKLTFDEEAYKNVNQEVVDFEKLDDYASAFQGHDVGFCCLGTTRGKAGAEGFVRVDRDYVLKSAELAKAGGCKHFNLLSSKGADKSSNFLYLQVKGEVEAKVEELKFDRYSVFRPGVLLCDRQESRPGEWLVRKFFGSLPDSWASGHSVPVVTVVRAMLNNVVRPRDKQMELLENKAIHDLGKAHGSLKP

SEQ ID NO: 71292 - protein, 14 aa, Homo sapiens
IGYIFIGIFILEYR

SEQ ID NO: 71293 - protein, 46 aa, Homo sapiens
LLAGYALGVGLFLLLLQPLTDPKLYGSLPLCVLLERAGDSEAPLCS

SEQ ID NO: 71294 - protein, 9 aa, Homo sapiens
LLLHFLGLV

SEQ ID NO: 71295 - protein, 146 aa, Homo sapiens
RQYIQLELPAFALACLMLMPHSEKRHQQIKNFLGSCDPQVILKQLEEHMNTGQLAGFSHQIRSLILNNIINKKEFGILAKTKYFQMLKMHAMNTNNITELVNYLANDLSLDEASVLITEYSKHCGKPVPPDTAPCEILKMFLSGLS

SEQ ID NO: 71296 - protein, 343 aa, Homo sapiens
VFPLAAGIFFVRLLFERFIAKPCALCIGIEDSGPYQAQPNAILEKVFISITKYPDKKRLEGLSKQLDWNVRKIQCWFRHRRNQDKPPTLTKFCESMWRFTFYLCIFCYGIRFLWSSPWFWDIRQCWHNYPFQPLSSGLYHYYIMELAFYWSLMFSQFTDIKRKDFLIMFVHHLVTIGLISFSYINNMVRVGTLIMCLHDVSDFLLEAAKLANYAKYQRLCDTLFVIFSAVFMVTRLGIYPFWILNTTLFESWEIIGPYASWWLLNGLLLTLQLLHVIWSYLIARIALKALIRGKVSKDDRSDVESSSEEEDVTTCTKSPCDSSSSNGANRVNGHMGGSYWAEE

SEQ ID NO: 71297 - protein, 71 aa, Homo sapiens
IPWSGMRFWKLILLTWLLQKILLQLMSLELADLPLKMKDVHLNWKCHWRANVHHFPRLYVSSGKMLMLSVG

SEQ ID NO: 71298 - protein, 333 aa, Homo sapiens
KAPLSKSLLLVPSALSLLLALLLPHCQKLFVYDLHAVKNDFQIWRLICGRIICLDLKDTFCSSLLIYNFRIFERRYGSRKFASFLLGSWVLSALFDFLLIEAMQYFFGITAASNLPSGFLAPVFALFVPFYCSIPRVQVAQILGPLSITNKTLIYILGLQLFTSGSYIWIVAISGLMSGLCYDSKMFQVHQVLCIPSWMAKFFSWTLEPIFSSSEPTSEARIGMGATLDIQRQQRMELLDRQLMFSQFAQGRRQRQQQGGMINWNRLFPPLRQRQNVNYQGGRQSEPAAPPLEVSEEQVARLMEMGFSRGDALEALRASNNDLNVATNFLLQH

SEQ ID NO: 71299 - protein, 104 aa, Homo sapiens
KGVFNAYHFSLLLTSFNCVADPVLYCFVSETTHRDLARLRGACLAFLTCSRTGRAREAYPLGAPEASGKSGAQGEEPELLTKLHPAFQTPNSPGSGGFPTGRLA

SEQ ID NO: 71300 - protein, 20 aa, Homo sapiens
IVFVLHTFLSAKVTRMGLLV

SEQ ID NO: 71301 - protein, 68 aa, Homo sapiens
ILWYLCGISAFLMQKDFVSPAYLKKWSAKGIQVVGWTVNTFDEKSYYESHLGSSYITDSMVEDCEPHF

SEQ ID NO: 71302 - protein, 52 aa, Homo sapiens
IIRPSSQYIVALVFATYLLKPLFPTCPVPEEAAKLVACHSVQLIVHQPTQVI

SEQ ID NO: 71303 - protein, 63 aa, Homo sapiens
VVLMAVLLLLALLTAALILYRRRQSIERGAFEGARYSRSSSSPTEATEKNILVSDMEMNEQQE

SEQ ID NO: 71304 - protein, 11 aa, Homo sapiens
LLLFSSLLLCR

SEQ ID NO: 71305 - protein, 44 aa, Homo sapiens
RDKTPTPALTFFAALVLVDSPWERVPESLVRLHVEQRHQNMGLQ

SEQ ID NO: 71306 - protein, 25 aa, Homo sapiens
VLLLVAVLQVCTLKRFFQDKRPVPT

SEQ ID NO: 71307 - protein, 8 aa, Homo sapiens
ISILAVAL

SEQ ID NO: 71308 - protein, 43 aa, Homo sapiens
VFGTLFGLLSWYGTYGFWYPKAFSPGLPPQSCSLNLKQDSYKK

SEQ ID NO: 71309 - protein, 751 aa, Homo sapiens
LPGLALLLLAAWTARALEVPTDGNAGLLAEPQIAMFCGRLNMHMNVQNGKWDSDPSGTKTCIDTKEGILQYCQEVYPELQITNVVEANQPVTIQNWCKRGRKQCKTHPHFVIPYRCLVGEFVSDALLVPDKCKFLHQERMDVCETHLHWHTVAKETCSEKSTNLHDYGMLLPCGIDKFRGVEFVCCPLAEESDNVDSADAEEDDSDVWWGGADTDYADGSEDKVVEVAEEEEVAEVEEEEADDDEDDEDGDEVEEEAEEPYEEATERTTSIATTTTTTTESVEEVVREVCSEQAETGPCRAMISRWYFDVTEGKCAPFFYGGCGGNRNNFDTEEYCMAVCGSAMSQSLLKTTQEPLARDPVKLPTTAASTPDAVDKYLETPGDENEHAHFQKAKERLEAKHRERMSQVMREWEEAERQAKNLPKADKKAVIQHFQEKVESLEQEAANERQQLVETHMARVEAMLNDRRRLALENYITALQAVPPRPRHVFNMLKKYVRAEQKDRQHTLKHFEHVRMVDPKKAAQIRSQVMTHLRVIYERMNQSLSLLYNVPAVAEEIQDEVDELLQKEQNYSDDVLANMISEPRISYGNDALMPSLTETKTTVELLPVNGEFSLDDLQPWHSFGADSVPANTENEGSGLTNIKTEEISEVKMDAEFRHDSGYEVHHQKLVFFAEDVGSNKGAIIGLMVGGVVIATVIVITLVMLKKKQYTSIHHGVVEVDAAVTPEERHLSKMQQNGYENPTYKFFEQMQN

SEQ ID NO: 71310 - protein, 373 aa, Homo sapiens
VRRVLLAAGCALVLVLAVQLGQQVLECRAVLAGLRSPRGAMRPEQEELVMVGTNHVEYRYGKAMPLIFVGGVPRSGTTLMRAMLDAHPEVRCGEETRIIPRVLAMRQAWSKSGREKLRLDEAGVTDEVLDAAMQAFILEVIAKHGEPARVLCNKDPFTLKSSVYLSRLFPNSKFLLMVRDGRASVHSMITRKVTIAGFDLSSYRDCLTKWNKAIEVMYAQCMEVGKEKCLPVYYEQLVLHPRRSLKLILDFLGIAWSDAVLHHEDLIGKPGGVSLSKIERSTDQVIKPVNLEALSKWTGHIPGDVVRDMAQIAPMLAQLGYDPYANPPNYGNPDPFVINNTQRVLKGDYKTPANLKGYFQVNQNSTSSHLGSS

SEQ ID NO: 71311 - protein, 35 aa, Homo sapiens
LFIATKTLLTLVASAAAASYGIKLLLPEEATSILP

SEQ ID NO: 71312 - protein, 11 aa, Homo sapiens
RVFLFLFFFFF

SEQ ID NO: 71313 - protein, 265 aa, Homo sapiens
MKTSYFSLLSFFFFCLGFCLNQKICPHAGAQDKFSLSAWPSPVVPLGGRVTLSCHSHLRFVIWTIFQTTGTRSHELHTGLSNNITISPVTPEHAGTYRCVGIYKHASKWSAESNSLKIIVTGLFTKPSISAHPSSLVHAGARVDPMMRLGEKLTLFCSSEISFDQYHLFRHGVAHGQWLSGGQRHREAFQANFSVGRATPVPGGTYRCYGSFNDSPYKPPVTRCNFTPQETLRVLLCHSQNPPLNLTHLALKDSPATCICSLDSQ

SEQ ID NO: 71314 - protein, 338 aa, Homo sapiens
MVVSMVCVGFFLLQGAWPHEGVHRKPSLLAHPGPLVKSEETVILQCWSDVRFQHFLLHREGKFKDTLHLIGEHHDGVSKANFSIGPMMQDLAGTYRCYGSVTHSPYQLSAPSDPLDIVITGLYEKPSLSAQPGPTVLAGESVTLSCSSRSSYDMYHLSREGEAHERRFSAGPKVNGTFQADFPLGPATHGGTYRCFGSFRDSPYEWSNSSDPLLVSVTGNPSNSWPSPTEPSSETGNPRHLHVLIGTSVVIILFILLLFFLLHRWCCNKKNAVVMDQEPAGNRTVNREDSDEQDPQEVTYAQLNHCVFTQRKITRPSQRPKTPPTDIIVYTELPNAEP

SEQ ID NO: 71315 - protein, 57 aa, Homo sapiens
IFTFTISFNLLSFWRHFSAKPRLETIELTCALCKLRSAAHRATAVSNVNCNHHDSRP

SEQ ID NO: 71316 - protein, 20 aa, Homo sapiens
MGALFVTLSLLGFDLSVRIF

SEQ ID NO: 71317 - protein, 11 aa, Homo sapiens
MQNFVLLFFFF

SEQ ID NO: 71318 - protein, 26 aa, Homo sapiens
IILFISFTVTTKEASQEDIQPPSENS

SEQ ID NO: 71319 - protein, 13 aa, Homo sapiens
ITTSWSLCLHLLF

SEQ ID NO: 71320 - protein, 40 aa, Homo sapiens
LATSLKWNLLVALLPLQLWCYTEKLEVSKQTREKEKHQKV

SEQ ID NO: 71321 - protein, 12 aa, Homo sapiens
IEFWLCHLLALF

SEQ ID NO: 71322 - protein, 14 aa, Homo sapiens
IFWIWVAFLHAPIV

SEQ ID NO: 71323 - protein, 20 aa, Homo sapiens
IICDSRELRSRFLLVLLWCE

SEQ ID NO: 71324 - protein, 11 aa, Homo sapiens
MLIVYVRFWWL

SEQ ID NO: 71325 - protein, 47 aa, Homo sapiens
IIFLHIITFTHLSVCHSYLQPGKSSPYLFRSFCIFRSPWSSRVPGRP

SEQ ID NO: 71326 - protein, 388 aa, Homo sapiens
IQKMRLLAKIICLMLWAICVAEDCNELPPRRNTEILTGSWSDQTYPEGTQAIYKCRPGYRSLGNVIMVCRKGEWVALNPLRKCQKRPCGHPGDTPFGTFTLTGGNVFEYGVKAVYTCNEGYQLLGEINYRECDTDGWTNDIPICEEISCKSPDVINGSPISQKIIYKENERFQYKCNMGYEYSERGDAVCTESGWRPLPSCEEKSCDNPYIPNGDYSPLRIKHRTGDEITYQCRNGFYPATRGNTAKCTSTGWIPAPRCTLKPCDYPDIKHGGLYHENMRRPYFPVAVGKYYSYYCDEHFETPSGSYWDHIHCTQDGWSPAVPCLRKCYFPYLENGYNQNHGRKFVQGKSIDVACHPGYALPKAQTTVTCMENGWSPTPRCIRVSFTL

SEQ ID NO: 71327 - protein, 9 aa, Homo sapiens
LPFGLFLTF

SEQ ID NO: 71328 - protein, 77 aa, Homo sapiens
ITLLIMFLKLSAKLIYLSIPSWSESQTSARHGRLCRHSSGKKRELPSPSSRCSPAGPPSPGRSAPLPSSFHFCRLRN

SEQ ID NO: 71329 - protein, 11 aa, Homo sapiens
KLFLVLIHTIL

SEQ ID NO: 71330 - protein, 138 aa, Homo sapiens
LCGRLAWRWLAWPLAVVTCGEHVFSAAPSAQGGDSTTCHPRSKTCRNPEYLLAGADIIETNTFSSTSIAQADYGLEHLAYRMNMCSAGVARKAAEEVTLQTGIKRFVAGALGPTNKTLSVSPSVERPDYRNINLPVGS

SEQ ID NO: 71331 - protein, 275 aa, Homo sapiens
KMPALRPALLWALLALWLCWAAPAHALQCRDGYEPCVNKGMCVTYHSGTGYCKCPEGFLGEYCQHRDPCEKNRCQNGGTCVAQAMLGKATCRCASGFTGEDCQYSTPHPCFVSRPCLNGGTCHMLSRDTYECTCQVGFTGKECQWTDACLSHLCANGSTCTTVANQFSCKCLTGFTGQKCETDVNECDIPGHCQHGGTCLNLPGSYQCQCLQGFTGQYCDRLYVPCAHSPCVNGGTCRQTGDFTFECNCLPETVRNKRNRALGKRQASLEWKRTR

SEQ ID NO: 71332 - protein, 136 aa, Homo sapiens
LASCCLLFIGFLNPLLSLPLLDSREISFQLSAPHEDARLTPEELERASLLQILPEMLGAERGDILRKADSSTNIFNPRGNLRKFQDFSGQDPNILLSHLLARIWKPYKKQRRKLRQDLRLWKKEPGLRIFKNYVWV

SEQ ID NO: 71333 - protein, 11 aa, Homo sapiens
LLLSIVLLLIL

SEQ ID NO: 71334 - protein, 14 aa, Homo sapiens
LAAATWIFLIVLCH

SEQ ID NO: 71335 - protein, 30 aa, Homo sapiens
VTHLWDLAFLCCLFKAGFLSLGTTEVLGNR

SEQ ID NO: 71336 - protein, 690 aa, Homo sapiens
RIATVSIAAAVAPLTLFLYRGDGGLSSRRRADAAAGALCGEVAVKPPINPFTEFMEKAVNDGSHSEELFCHLKTISEKEDLPRCTSESHLSCLKQDILNEKTELEATLKEAELVTHSVELLLPLFKDTIEKINFENANLSALNLKISEQKEILIKELDTFKSVKLALEHLLRKRDYKQTGDNLSSMLLENLTDNESENTNLKKKVFEKEAHIQELSCLFQSEKANTLKANRFSQSVKVVHERLQIQIHKREAENDKLKEYVKSLETKIAKWNLQSRMNKNEAIVMKEASRQKTVALKKASKVYKQRLDHFTGAIEKLTSQIRDQEAKLSETISASNAWKSHYEKIVIEKTELEVQIETMKKQIINLLEDLKKMEDHGKNSCEEILRKVHSIEYENETLNLENTKLKLRFPCRITESKNMNILIVLDMLCYISSEKTTLAALKDEVVSVENELSELQEVEKKQKTLIEMYKTQVQKLQEAAEIVKSRCENLLHKNNQITKTKNKNVEKMRGQMESHLKELERVCDSLTAAERRLHECQESLQCCKGKCADQEHTIRELQGQVDGNHNLLTKLSLEEENCLIQLKCENLQQKLEQMDAENKELEKKLANQEECLKHSNLKFKEKSAEYTALARQLEAALEEGRQKVAEEIEKMSSRESALQIKILDLETELRKKNEEQNQLVCKMNSDPETP

SEQ ID NO: 71337 - protein, 52 aa, Homo sapiens
VFYSKVLNMGVSFFYSLSLMTQQKRNCRPWDNQHLNKLYNYFFKLSYRVIRL

SEQ ID NO: 71338 - protein, 30 aa, Homo sapiens
RRMKAWELISLSLALMLLLEWKEILTSKEN

SEQ ID NO: 71339 - protein, 113 aa, Homo sapiens
ILSVVLVLIYLYLTPCRCWCRGVEKPSSHQGDSLSSSMLSTTPNHDPMAGGDKDDGFDRRVAFLEPAGPGQGQNGKLKPGNTLPVPEATGKGQRRMSDPESVSSVFSDTPIVV

SEQ ID NO: 71340 - protein, 57 aa, Homo sapiens
ISPAGARVFCMASCLLLSPLLVDGISAGTEGQLTLRPDWAAQVLTRLGCHLQCITRS

SEQ ID NO: 71341 - protein, 11 aa, Homo sapiens
MLIVYVRFWWL

SEQ ID NO: 71342 - protein, 28 aa, Homo sapiens
IGMPLPVLLCLTLPMPLPSATARGGNRT

SEQ ID NO: 71343 - protein, 11 aa, Homo sapiens
IFLYHFCYLSV

SEQ ID NO: 71344 - protein, 57 aa, Homo sapiens
VSTLISCVASSLVLVPPGSGSQDRLSSDPSAATVAAAGGSEKSKGCWERLVARQGLY

SEQ ID NO: 71345 - protein, 15 aa, Homo sapiens
RRDLLEVRIVFVCLL

SEQ ID NO: 71346 - protein, 60 aa, Homo sapiens
LSLIILLRMSGASVLCALGLHTGGATNSHCPGLLVDSPRHRCRNLPIQCTKSSFTWCGPT

SEQ ID NO: 71347 - protein, 40 aa, Homo sapiens
IRIPLVLLMYFSIPTPYSGSLASKLRSLAFAPGAGTRGRI

SEQ ID NO: 71348 - protein, 544 aa, Homo sapiens
ISLLFLAVMYVVHHPLMVSDRMDLDTLARSRQLEKRMSEEMRLLEMEFEERKRAAEQRQKAENFWTGDTSSDQLVLGKKDMGWPFQADGQEGPLGWMLGNLWNTGLFCLFLVFELLRQNMQHEPAFDSSSEEEEEEVRVVPVTSYNWLTDFPSQEALDSFYKHYVQNAIRDLPCTCEFVESFVDDLIEACRVLSRQEAHPQLEDCLGIGAAFEKWGTLHETQKFDILVPIVPPQGTMFVLEMRDPALGRRCGCVLVESECVCKREKLLGDVLCLVHHHRDPSAVLGKCSSSIKAALCTGFHLDVCKTVQWFRNMMGNAWALVAHKYDFKLSLPPSTTSCKLRLDYRSGRFLSIHLVLGVQREDTLVYLVSQAPDQEQLTSVDWPESFVACEHLFLKLVGRFAPENTCHLKCLQIILSLRQHQSLPHGASRPILTSYHFKTALMHLLLRLPLTDWAHNMLSQRLQDILWFLGRGLQQRSLHHFLIGNNFLPLTIPIPKTFRNAEPVNLFQHLVLNPKAHSQAVEEFQNLLTQVKTLPHAPLAAAP

SEQ ID NO: 71349 - protein, 26 aa, Homo sapiens
VSWGSFVKFLLMWVNLSLIQLLPYID

SEQ ID NO: 71350 - protein, 11 aa, Homo sapiens
MALIFTVCIAT

SEQ ID NO: 71351 - protein, 168 aa, Homo sapiens
KTFMMICFHLINTVTFVPVSKVSGQAEVDDILAAVRPTTRLVTIMLANNETGIVMPVPEISQRIKALNQERVAAGLPPILVHTDAAQALGKQRVDVEDLGVDFLTIVGHKFYGPRIGALYIRGLGEFTPLYPMLFGGGQERNFRPGTENTPMIAGLGKVSPGELEEMS

SEQ ID NO: 71352 - protein, 10 aa, Homo sapiens
MTMVVLFLTS

SEQ ID NO: 71353 - protein, 16 aa, Homo sapiens
RENTFGPTVLLTLTFF

SEQ ID NO: 71354 - protein, 29 aa, Homo sapiens
IRQLKPLFKEMVLCSVFVLLISLEVLDEG

SEQ ID NO: 71355 - protein, 21 aa, Homo sapiens
ITINHTYLMSVFCAIFFSDCL

SEQ ID NO: 71356 - protein, 71 aa, Homo sapiens
VHFPVWIYIGHLCMTFVLTKRFTENCGRQECLNACLCRQMKMNTVLKCICLIQLKPWKGYEYYRTIRPCIF

SEQ ID NO: 71357 - protein, 11 aa, Homo sapiens
MFSSLILLSLS

SEQ ID NO: 71358 - protein, 376 aa, Homo sapiens
LPFLGALGVAVAVAEIGCTMSAFEKPQIIAHIQKGFNYTVFDCKWVPCSAKFVTMGNFARGTGVIQLYEIQHGDLKLLREIEKAKPIKCGTFGATSLQQRYLATGDFGGNLHIWNLEAPEMPVYSVKGHKEIINAIDGIGGLGIGEGAPEIVTGSRDGTVKVWDPRQKDDPVANMEPVQGENKRDCWTVAFGNAYNQEERVVCAGYDNGDIKLFDLRNMALRWETNIKNGVCSLEFDRKDISMNKLVATSLEGKFHVFDMRTQHPTKGFASVSEKAHKSTVWQVRHLPQNRELFLTAGGAGGLHLWKYEYPIQRSKKDSEGIEMGVAGSVSLLQNVTLSTQPISSLDWSPDKRGLCVCSSFDQTVRVLIVTKLNKI

SEQ ID NO: 71359 - protein, 349 aa, Homo sapiens
LAACFWVIFMFMVASKFITLTFKDPDVYSAKQEFLFLTTMPEVRKLPEEKHIPEELKPTGKELPDSQLVQPLVYMERLELIRNVCRDDALKNLSHTPVSKFVLDRIFVCDKHKILFCQTPKVGNTQWKKVLIVLNGAFSSIEEIPENVVHDHEKNGLPRLSSFSDAEIQKRLKTYFKFFIVRDPFERLISAFKDKFVHNPRFEPWYRHEIAPGIIRKYRRNRTETRGIQFEDFVRYLGDPNHRWLDLQFGDHIIHWVTYVELCAPCEIMYSVIGHHETLEDDAPYILKEAGIDHLVSYPTIPPGITVYNRTKVEHYFLGISKRDIRRLYARFEGDFKLFGYQKPDFLLN

SEQ ID NO: 71360 - protein, 593 aa, Homo sapiens
LDGILLPFMLLSQGLGVLRVAWDSRACSPALRALLRKLGGLFLPPEASLSLDSSEGLLARAVVQAVIEQLLVSGQPLLIFLEEPPGALGPRLSALGQAWVGFVVQAVQVGIVPDALLVPVAVTYDLVPDAPCDIDHASAPLGLWTGALAVLRSLWSRWGCSHRICSRVHLAQPFSLQEYIVSARSCWGGRQTLEQLLQPIVLGQCTAVPDTEKEQEWTPITGPLLALKEEDQLLVRRLSCHVLSASVGSSAVMSTAIMATLLLFKHQKGVFLSQLLGEFSWLTEEILLRGFDVGFSGQLRSLLQHSLSLLRAHVALLRIRQGDLLVVPQPGPGLTHLAQLSAELLPVFLSEAVGACAVRGLLAGRVPPQGPWELQGILLLSQNELYRQILLLMHLLPQDLLLLKPCQSSYCYCQEVLDRLIQCGLLVAEETPGSRPACDTGRQRLSRKLLWKPSGDFTDSDSDDFGEADGRYFRLSQQSHCPDFFLFLCRLLSPLLKAFAQAAAFLRQGQLPDTELGYTEQLFQFLQATAQEEGIFECADPKLAISAVWTFRDLGVLQQTPSPAGPRLHLSPTFASLDNQEKLEQFIRQFICS

SEQ ID NO: 71361 - protein, 14 aa, Homo sapiens
LFSQAISLSICLWL

SEQ ID NO: 71362 - protein, 21 aa, Homo sapiens
MLYILMIALGHLSLKAQMDGI

SEQ ID NO: 71363 - protein, 983 aa, Homo sapiens
IFYFALFSCLFGICDAVTGSRVYPANEVTLLDSRSVQGELGWIASPLEGGWEEVSIMDEKNTPIRTYQVCNVMEPSQNNWLRTDWITREGAQRVYIEIKFTLRDCNSLPGVMGTCKETFNLYYYESDNDKERFIRENQFVKIDTIAADESFTQVDIGDRIMKLNTEIRDVGPLSKKGFYLAFQDVGACIALVSVRVFYKKCPLTVRNLAQFPDTITGADTSSLVEVRGSCVNNSEEKDVPKMYCGADGEWLVPIGNCLCNAGHEERSGECQACKIGYYKALSTDATCAKCPPHSYSVWEGATSCTCDRGFFRADNDAASMPCTRPPSAPLNLISNVNETSVNLEWSSPQNTGGRQDISYNVVCKKCGAGDPSKCRPCGSGVHYTPQQNGLKTTKVSITDLLAHTNYTFEIWAVNGVSKYNPNPDQSVSVTVTTNQAAPSSIALVQAKEVTRYSVALAWLEPDRPNGVILEYEVKYYEKDQNERSYRIVRTAARNTDIKGLNPLTSYVFHVRARTAAGYGDFSEPLEVTTNTVPSRIIGDGANSTVLLVSVSGSVVLVVILIAAFVISRRRSKYSKAKQEADEEKHLNQGVRTYVDPFTYEDPNQAVREFAKEIDASCIKIEKVIGVGEFGEVCSGRLKVPGKREICVAIKTLKAGYTDKQRRDFLSEASIMGQFDHPNIIHLEGVVTKCKPVMIITEYMENGSLDAFLRKNDGRFTVIQLVGMLRGIGSGMKYLSDMSYVHRDLAARNILVNSNLVCKVSDFGMSRVLEDDPEAAYTTRGGKIPIRWTAPEAIAYRKFTSASDVWSYGIVMWEVMSYGERPYWDMSNQDVIKAIEEGYRLPPPMDCPIALHQLMLDCWQKERSDRPKFGQIVNMLDKLIRNPNSLKRTGTESSRPNTALLDPSSPEFSAVVSVGDWLQAIKMDRYKDNFTAAGYTTLEAVVHVNQEDLARIGITAITHQNKILSSVQAMRTQMQQMHGRMVPV

SEQ ID NO: 71364 - protein, 402 aa, Homo sapiens
LVEGTMNWHLPLFLLASVTLPSICSHFNPLSLEELGSNTGIQVFNQIVKSRPHDNIVISPHGIASVLGMLQLGADGRTKKQLAMVMRYGVNGVGKILKKINKAIVSKKNKDIVTVANAVFVKNASEIEVPFVTRNKDVFQCEVRNVNFEDPASACDSINAWVKNETRDMIDNLLSPDLIDGVLTRLVLVNAVYFKGLWKSRFQPENTKKRTFVAADGKSYQVPMLAQLSVFRCGSTSAPNDLWYNFIELPYHGESISMLIALPTESSTPLSAIIPHISTKTIDSWMSIMVPKRVQVILPKFTAVAQTDLKEPLKVLGITDMFDSSKANFAKITRSENLHVSHILQKAKIEVSEDGTKASAATTAILIARSSPPWFIVDRPFLFFIRHNPTGAVLFMGQINKP

SEQ ID NO: 71365 - protein, 45 aa, Homo sapiens
MFFCLAVLWAEVVKRPSSQRALMNAVSSSCSPHPITNRLQFFGFF

SEQ ID NO: 71366 - protein, 51 aa, Homo sapiens
TSFLFAFILRCFSLFSLVLQHPSHRRHSHLPKGHVCPWSHQARSHQDREHA

SEQ ID NO: 71367 - protein, 17 aa, Homo sapiens
ILHGFHLLIIMMLFMQY

SEQ ID NO: 71368 - protein, 25 aa, Homo sapiens
LGLSFLLLCFKMANKSWSSESPVQT

SEQ ID NO: 71369 - protein, 18 aa, Homo sapiens
MFPSWPFLWLTLCSLCIC

SEQ ID NO: 71370 - protein, 113 aa, Homo sapiens
VWVRSVLLLLGGLRASATSTPVSLGSSPPCRHHVPSDTEVINKVHLKANHVVKRDVDEHLRIKTVYDKSVEELLPEKKNLVKNKLFPQAISYLEKTFQVRRPAGTILLSRYVT

SEQ ID NO: 71371 - protein, 26 aa, Homo sapiens
KWIFLQWILEMTVALADNLIAACEGP

SEQ ID NO: 71372 - protein, 340 aa, Homo sapiens
LNCGVSIALLGVLLLGAARLPRGAEAFEIALPRESNITVLIKLGTPTLLAKPCYIVISKRHITMLSIKSGERIVFTFSCQSPENHFVIEIQKNIDCMSGPCPFGEVQLQPSTSLLPTLNRTFIWDVKAHKSIGLELQFSIPRLRQIGPGESCPDGVTHSISGRIDATVVRIGTFCSNGTVSRIKMQEGVKMALHLPWFHPRNVSGFSIANRSSIKRLCIIESVFEGEGSATLMSANYPEGFPEDELMTWQFVVPAHLRASVSFLNFNLSNCERKEERVEYYIPGSTTNPEVFKLEDKQPGNMAGNFNLSLQGCDQDAQSPGILRLQFQVLVQHPQNESSE

SEQ ID NO: 71373 - protein, 833 aa, Homo sapiens
LNCGVSIALLGVLLLGAARLPRGAEAFEIALPRESNITVLIKLGTPTLLAKPCYIVISKRHITMLSIKSGERIVFTFSCQSPENHFVIEIQKNIDCMSGPCPFGEVQLQPSTSLLPTLNRTFIWDVKAHKSIGLELQFSIPRLRQIGPGESCPDGVTHSISGRIDATVVRIGTFCSNGTVSRIKMQEGVKMALHLPWFHPRNVSGFSIANRSSIKRLCIIESVFEGEGSATLMSANYPEGFPEDELMTWQFVVPAHLRASVSFLNFNLSNCERKEERVEYYIPGSTTNPEVFKLEDKQPGNMAGNFNLSLQGCDQDAQSPGILRLQFQVLVQHPQNESNKIYVVDLSNERAMSLTIEPRPVKQSRKFVPGCFVCLESRTCSSNLTLTSGSKHKISFLCDDLTRLWMNVEKTISCTDHRYCQRKSYSLQVPSDILHLPVELHDFSWKLLVPKDRLSLVLVPAQKLQQHTHEKPCNTSFSYLVASAIPSQDLYFGSFCPGGSIKQIQVKQNISVTLRTFAPSFQQEASRQGLTVSFIPYFKEEGVFTVTPDTKSKVYLRTPNWDRGLPSLTSVSWNISVPRDQVACLTFFKERSGVVCQTGRAFMIIQEQRTRAEEIFSLDEDVLPKPSFHHHSFWVNISNCSPTSGKQLDLLFSVTLTPRTVDLTVILIAAVGGGVLLLSALGLIICCVKKKKKKTNKGPAVGIYNDNINTEMPRQPKKFQKGRKDNDSHVYAVIEDTMVYGHLLQDSSGSFLQPEVDTYRPFQGTMGVCPPSPPTICSRAPTAKLATEEPPPRSPPESESEPYTFSHPNNGDVSSKDTDIPLLNTQEPMEPAE

SEQ ID NO: 71374 - protein, 428 aa, Homo sapiens
RPASTCFHPWGMTTQLGPALVLGVALCLGCGQPLPQVPERPFSVLWNVPSAHCEARFGVHLPLNALGIIANRGQHFHGQNMTIFYKNQLGLYPYFGPRGTAHNGGIPQALPLDRHLALAAYQIHHSLRPGFAGPAVLDWEEWCPLWAGNWGRRRAYQAASWAWAQQVFPDLDPQEQLYKAYTGFEQAARALMEDTLRVAQALRPHGLWGFYHYPACGNGWHSMASNYTGRCHAATLARNTQLHWLWAASSALFPSIYLPPRLPPAHHQAFVRHRLEEAFRVALVGHRHPLPVLAYVRLTHRRSGRFLSQDDLVQSIGVSAALGAAGVVLWGDLSLSSSEEECWHLHDYLVDTLGPYVINVTRAAMACSHQRCHGHGRCARRDPGQMEAFLHLWPDGSLGDWKSFSCHCYWGWAGPTCQEPRPGPKEAV

SEQ ID NO: 71375 - protein, 60 aa, Homo sapiens
IYQSGMPVTWFLAWSAFFQVCLGPSPARGYSTLQARYAFFQPLGCGHCIQVGTSFPSLPF

SEQ ID NO: 71376 - protein, 11 aa, Homo sapiens
ISYFNLFVILS

SEQ ID NO: 71377 - protein, 542 aa, Homo sapiens
KLLSGSEDSRGLQVAMLMLFVFGVLLHEVSLSGQNEAPPNTHSIPGEPLYNYASIRLPEEHIPFFLHNNRHIATVCRKDSLCPYKKHLEKLKYCWGYEKSCKPEFRFGYPVCSYVDMGWTDTLESAEDIFWKQADFGYARERLEEMHVLCQPKETSDSSLVCSRYLQYCRATNLYLDLRNIKRNHDRFKEDFFQSGEIGGHCKLDIRTLTSEGQRKSPLQSWFAELQSYTQLNFRPIEDAKCDIVIEKPTYFMKLDAGVNMYHHFCDFINLYITQHVNNSFSTDVYIVMWDTSSYGYGDLFSDTWNAFTDYDVIHLKTYDSKRVCFKEAVFSLLPRMRYGLFYNTPLISGCQNTGLFRAFAQHVLHRLNITQEGPKDGKIRVTILARSTEYRKILNQNELVNALKTVSTFEVQIVDYKYRELGFLDQLRITHNTDIFIGMHGAGLTHLLFLPDWAAVFELYNCEDERCYLDLARLRGVHYITWRRQNKVFPQDKGHHPTLGEHPKFTNYSFDVEEFMYLVLQAADHVLQHPKWPFKKKHDEL

SEQ ID NO: 71378 - protein, 14 aa, Homo sapiens
LISLFCFLSLPPLS

SEQ ID NO: 71379 - protein, 99 aa, Homo sapiens
LLLLLLPPLLLTPRAGDAAVITGACDKDSQCGGGMCCAVSIWVKSIRICTPMGKLGDSCHPLTRKVPFFGRRMHHTCPCLPGLACLRTSFNRFICLAQK

SEQ ID NO: 71380 - protein, 20 aa, Homo sapiens
MITVTKLLSMIICLISSSCF

SEQ ID NO: 71381 - protein, 18 aa, Homo sapiens
LWCLLLFWLFMEHVLQWM

SEQ ID NO: 71382 - protein, 23 aa, Homo sapiens
LLFFWIMFKKFTLNLVLFVSMKS

SEQ ID NO: 71383 - protein, 33 aa, Homo sapiens
MGKLYMYTYYLAQYFISLVLEFSVNPATGFEEF

SEQ ID NO: 71384 - protein, 15 aa, Homo sapiens
MPIICWLCMLCLLSY

SEQ ID NO: 71385 - protein, 12 aa, Homo sapiens
ILFSFLKMYIFF

SEQ ID NO: 71386 - protein, 19 aa, Homo sapiens
LALCPTLLMALGGPWLILS

SEQ ID NO: 71387 - protein, 98 aa, Homo sapiens
VLLFVSLAMALQLSREQGITLRGSAEIVAEFFSFGINSILYQRGIYPSETFTRVQKYGLTLLVTTDLELIKYLNNVVEQLKVHPEKSLRKLSRMKSVQ

SEQ ID NO: 71388 - protein, 17 aa, Homo sapiens
VMCSLLINMCCLLSANF

SEQ ID NO: 71389 - protein, 11 aa, Homo sapiens
ILFLTFTYSLG

SEQ ID NO: 71390 - protein, 1171 aa, Homo sapiens
LPLLLVLALSQGILNCCLAYNVGLPEAKIFSGPSSEQFGYAVQQFINPKGNWLLVGSPWSGFPENRMGDVYKCPVDLSTATCEKLNLQTSTSIPNVTEMKTNMSLGLILTRNMGTGGFLTCGPLWAQQCGNQYYTTGVCSDISPDFQLSASFSPATQPCPSLIDVVVVCDESNSIYPWDAVKNFLEKFVQGLDIGPTKTQVGLIQYANNPRVVFNLNTYKTKEEMIVATSQTSQYGGDLTNTFGAIQYARKYAYSAASGGRRSATKVMVVVTDGESHDGSMLKAVIDQCNHDNILRFGIAVLGYLNRNALDTKNLIKEIKAIASIPTERYFFNVSDEAALLEKAGTLGEQIFSIEGTVQGGDNFQMEMSQVGFSADYSSQNDILMLGAVGAFGWSGTIVQKTSHGHLIFPKQAFDQILQDRNHSSYLGYSVAAISTGESTHFVAGAPRANYTGQIVLYSVNENGNITVIQAHRGDQIGSYFGSVLCSVDVDKDTITDVLLVGAPMYMSDLKKEEGRVYLFTIKEGILGQHQFLEGPEGIENTRFGSAIAALSDINMDGFNDVIVGSPLENQNSGAVYIYNGHQGTIRTKYSQKILGSDGAFRSHLQYFGRSLDGYGDLNGDSITDVSIGAFGQVVQLWSQSIADVAIEASFTPEKITLVNKNAQIILKLCFSAKFRPTKQNNQVAIVYNITLDADGFSSRVTSRGLFKENNERCLQKNMVVNQAQSCPEHIIYIQEPSDVVNSLDLRVDISLENPGTSPALEAYSETAKVFSIPFHKDCGEDGLCISDLVLDVRQIPAAQEQPFIVSNQNKRLTFSVTLKNKRESAYNTGIVVDFSENLFFASFSLPVDGTEVTCQVAASQKSVACDVGYPALKREQQVTFTINFDFNLQNLQNQASLSFQALSESQEENKADNLVNLKIPLLYDAEIHLTRSTNINFYEISSDGNVPSIVHSFEDVGPKFIFSLKVTTGSVPVSMATVIIHIPQYTKEKNPLMYLTGVQTDKAGDISCNADINPLKIGQTSSSVSFKSENFRHTKELNCRTASCSNVTCWLKDVHMKGEYFVNVTTRIWNGTFASSTFQTVQLTAAAEINTYNPEIYVIEDNTVTIPLMIMKPDEKAEVPTGVIIGSIIAGILLLLALVAILWKLGFFKRKYEKMTKNPDEIDETTELSS

SEQ ID NO: 71391 - protein, 18 aa, Homo sapiens
LAFLLTVFGTTVHLAAQT

SEQ ID NO: 71392 - protein, 15 aa, Homo sapiens
LHLLLIKLVAPFTFL

SEQ ID NO: 71393 - protein, 19 aa, Homo sapiens
MPALYRKWPLFSKALGLFL

SEQ ID NO: 71394 - protein, 56 aa, Homo sapiens
LTVLIGILTLFFPESLGMTLPETLEQMQKVKWFRSGKKTRDSMETEENPKVLITAF

SEQ ID NO: 71395 - protein, 26 aa, Homo sapiens
MSCILLTFGMFHSLEYFLFSTCLKSL

SEQ ID NO: 71396 - protein, 10 aa, Homo sapiens
LTFLSYIIFL

SEQ ID NO: 71397 - protein, 18 aa, Homo sapiens
INFQMLFSILMLLDQCSV

SEQ ID NO: 71398 - protein, 35 aa, Homo sapiens
MIYYRKMFNNFQANGIIFAPLSLLIYYSLELENCC

SEQ ID NO: 71399 - protein, 21 aa, Homo sapiens
MLRFMALLAAFLENSKQLLFR

SEQ ID NO: 71400 - protein, 62 aa, Homo sapiens
IFFCLLRSSLALFFSFPISDLFQGESGFGGRGRKVGLQDQPPPTTIKTTRIFFCKFLTALNS

SEQ ID NO: 71401 - protein, 44 aa, Homo sapiens
MESRTLLLLFSGAVALIQTWAEMISFLHYNSGKGNRLRCKCAPK

SEQ ID NO: 71402 - protein, 49 aa, Homo sapiens
KGLVKGLQGDGLGGRRFLFLLPFCLCSPNVPVSPLPHLGPLFGPCGQSC

SEQ ID NO: 71403 - protein, 9 aa, Homo sapiens
VWRLLLSVI

SEQ ID NO: 71404 - protein, 44 aa, Homo sapiens
KMNSSLLLFLISLRTNLSTFFRNPCKRPISLNRHWQKRHIWMPV

SEQ ID NO: 71405 - protein, 15 aa, Homo sapiens
IGRLQIFYFSNVIFL

SEQ ID NO: 71406 - protein, 46 aa, Homo sapiens
VGSVIEMGSSIFMLFSPLVLYDCYLYEALVITKHFFCPFLPELCKL

SEQ ID NO: 71407 - protein, 14 aa, Homo sapiens
KYSCYFLYVILSVL

SEQ ID NO: 71408 - protein, 15 aa, Homo sapiens
LWWLITVVYTQCRLE

SEQ ID NO: 71409 - protein, 35 aa, Homo sapiens
IKVTLVLYSILTTAGALLSDTGLYFVLGLSEVRSA

SEQ ID NO: 71410 - protein, 17 aa, Homo sapiens
LFRNGLQLIFIFIWSFQ

SEQ ID NO: 71411 - protein, 1247 aa, Homo sapiens
RVSVLLGLFYLPFLWFCGWTFTTKADSMGDQQLYKTNHVAHGSENLFYQQPPLGVHSGLNHNYGNAVTGGGMDAPQASPISPHFPQDTRDGLGLPVGSKNLGQMDTSRQGGWGSHAGPGNHVQLRGNLANSNMMWGAPAQAEPTDGYQYTYSQASEIRTQKLTSGVLHKLDSFTQVFANQNLRIQVNNMAQVLHTQSAVMDGAPDSALRQLLSQKPMEPPAPAIPSRYQQVPQQPHPGFTGGLSKPALQVGQHPTQGHLYYDYQQPLAQVPVQGGQPLQAPQMLSQHMQQMQQHQYYPPQQQQQAGQQRISMQEIQTQPQQIRPSQPQPPPQQQQPQQLQLQQRQGSMQIPQYYQPQPMMQHLQEQQQQQMHLQPPSYHRDPHQYTPEQAHTVQLIPLGSMSQYYYQEPQQPYSHPLYQQSHLSQHQQREDSQLKTYSSDRQAQAMLSSHGDLGPPDTGMGDPASSDLTRVSSTLPHRPLLSPSGIHLNNMGPQHQQLSPSAMWPQMHLPDGRAQPGSPESSGQPKGAFGEQFDAKNKLTCSICLKEFKNLPALNGHMRSHGGMRASPNLKQEEGEKVLPPQPQPPLPPPPPPPPPPQLPPEAESLTPMVMPVSVPVKLLPPKPSSQGFTNSTVAAPSARDKPASSMSDDEMPVLVRMTLSPPHSPQGAAPRTPAEIPRKHQPSVPKAEEPLKTVQEKKKFRHRPEPLFIPPPPSYNPNPAASYSGATLYQSQLRSPRVLGDHLLLDPTHELPPYTPPPMLSPVRQGSGLFSNVLISGHGPGAHPQLPLTPLTPTPRVLLCRSNSIDGSNVTVTPGPGEQTVDVEPRINIGLRFQAEIPELQDISALAQDTHKATLVWKPWPELENHDLQQRVENLLNLCCSSALPGGGTNSEFALHSLFEAKGDVMVALEMLLLRKPVRLKCHPLANYHYAGSDKWTSLERKLFNKALATYSKDFIFVQKMVKSKTVAQCVEYYYTWKKIMRLGRKHRTRLAEIIDDCVTSEEEEELEEEEEEDPEEDRKSTKEEESEVPKSPEPPPVPVLAPTEGPPLQALGQPSGSFICEMPNCGAVFSSRQALNGHARIHGGTNQVTKARGAIPSGKQKPGGTQSGYCSVKSSPSHSTTSGETDPTTIFPCKECGKVFFKIKSRNAHMKTHRQQEEQQRQKAQKAAFAAEMAATIERTTGPVGAPGLLPLDQLSLIKPIKDVDILDDDVVQQLGGVMEEAEVVDTDLLLDDQDSVLLQGDAEL

SEQ ID NO: 71412 - protein, 24 aa, Homo sapiens
IGFFLFPFLRSFLFVTEKVQSKFD

SEQ ID NO: 71413 - protein, 19 aa, Homo sapiens
LFSLPPSGFCSFLLLLSAA

SEQ ID NO: 71414 - protein, 12 aa, Homo sapiens
VTAPFLIYLMAL

SEQ ID NO: 71415 - protein, 60 aa, Homo sapiens
ILRSQWSPALTVSKVLLSICSLLCDPNPDDPLVPEIAHTYKADREKYNRLAREWTQKYAM

SEQ ID NO: 71416 - protein, 1155 aa, Homo sapiens
VRGAPLLSCLLALLALCPGGRPQTVLTDDEIEEFLEGFLSELEPEPREDDVEAPPPPEPTPRVRKAQAGGKPGKRPGTAAEVPPEKTKDKGKKGKKDKGPKVPKESLEGSPRPPKKGKEKPPKATKKPKEKPPKATKKPKEKPPKATKKPKEKPPKATKKPPSGKRPPILAPSETLEWPLPPPPSPGPEELPQEGGAPLSNNWQNPGEETHVEAREHQPEPEEETEQPTLDYNDQIEREDYEDFEYIRRQKQPRPPPSRRRRPERVWPEPPEEKAPAPAPEERIEPPVKPLLPPLPPDYGDGYVIPNYDDMDYYFGPPPPQKPDAERQTDEEKEELKKPKKEDSSPKEETDKWAVEKGKDHKEPRKGEELEEEWTPTEKVKCPPIGMESHRIEDNQIRASSMLRHGLGAQRGRLNMQTGATEDDYYDGAWCAEDDARTQWIEVDTRRTTRFTGVITQGRDSSIHDDFVTTFFVGFSNDSQTWVMYTNGYEEMTFHGNVDKDTPVLSELPEPVVARFIRIYPLTWNGSLCMRLEVLGCSVAPVYSYYAQNEVVATDDLDFRHHSYKDMRQLMKVVNEECPTITRTYSLGKSSRGLKIYAMEISDNPGEHELGEPEFRYTAGIHGNEVLGRELLLLLMQYLCREYRDGNPRVRSLVQDTRIHLVPSLNPDGYEVAAQMGSEFGNWALGLWTEEGFDIFEDFPDLNSVLWGAEERKWVPYRVPNNNLPIPERYLSPDATVSTEVRAIIAWMEKNPFVLGANLNGGERLVSYPYDMARTPTQEQLLAAAMAAARGEDEDEVSEAQETPDHAIFRWLAISFASAHLTLTEPYRGGCQAQDYTGGMGIVNGAKWNPRTGTINDFSYLHTNCLELSFYLGCDKFPHESELPREWENNKEALLTFMEQVHRGIKGVVTDEQGIPIANATISVSGINHGVKTASGGDYWRILNPGEYRVTAHAEGYTPSAKTCNVDYDIGATQCNFILARSNWKRIREIMAMNGNRPIPHIDPSRPMTPQQRRLQQRRLQHRLRLRAQMRLRRLNATTTLGPHTVPPTLPPAPATTLSTTIEPWGLIPPTTAGWEESETETYTEVVTEFGTEVEPEFGTKVEPEFETQLEPEFETQLEPEFEEEEEEEKEEEIATGQAFPFTTVETYTVNFGDF

SEQ ID NO: 71417 - protein, 35 aa, Homo sapiens
LGVGLAVVVSLTLTAVILVLTRRCRTASHPVSASE

SEQ ID NO: 71418 - protein, 824 aa, Homo sapiens
RPPHHPRGQDQLWLVLTGLTQQVALTFLRLLDVHTEVEEEEEKEEGSSLAQEQVAQGLRRLEGSSWPFSMVSHGSSPSLLEALSSDFLACKICLEQLRAPKTLPCLHTYCQDCLAQLADGGRVRCPECRETVPVPPEGVASFKTNFFVNGLLDLVKARACGDLRAGKPACALCPLVGGTSTGGPATARCLDCADDLCQACADGHRCTRQTHTHRVVDLVGYRAGWYDEEARERQAAQCPQHPGEALRFLCQPCSQLLCRECRLDPHLDHPCLPLAEAVRARRPGLEGLLAGVDNNLVELEAARRVEKEALARLREQAARVGTQVEEAAEGVLRALLAQKQEVLGQLRAHVEAAEEAARERLAELEGREQVARAAAAFARRVLSLGREAEILSLEGAIAQRLRQLQGCPWAPGPAPCLLPQLELHPGLLDKNCHLLRLSFEEQQPQKDGGKDGAGTQGGEESQSRREDEPKTERQGGVQPQAGDGAQTPKEEKAQTTREEGAQTLEEDRAQTPHEDGGPQPHRGGRPNKKKKFKGRLKSISREPSPALGPNLDGSGLLPRPIFYCSFPTRMPGDKRSPRITGLCPFGPREILVADEQNRALKRFSLNGDYKGTVPVPEGCSPCSVAALQSAVAFSASARLYLINPNGEVQWRRALSLSQASHAVAALPSGDRVAVSVAGHVEVYNMEGSLATRFIPGGKASRGLRALVFLTTSPQGHFVGSDWQQNSVVICDGLGQVVGEYKGPGLHGCQPGSVSVDKKGYIFLTLREVNKVVILDPKGSLLGDFLTAYHGLEKPRVTTMVDGRYLVVSLSNGTIHIFRVRSPDS

SEQ ID NO: 71419 - protein, 20 aa, Homo sapiens
IFMAFVCFAMKNSLETDLLF

SEQ ID NO: 71420 - protein, 48 aa, Homo sapiens
ILFFSVYLNEAVYFDMYLFMIERKQSWPGTVAYTCNPGILGGQGGQIA

SEQ ID NO: 71421 - protein, 285 aa, Homo sapiens
VGLLAVPLLAAYLHIPPPQLSPALHSWKSSGKFFTYKGLRIFYQDSVGVVGSPEIVVLLHGFPTSSYDWYKIWEGLTLRFHRVIALDFLGFGFSDKPRPHHYSIFEQASIVEALLRHLGLQNRRINLLSHDYGDIVAQELLYRYKQNRSGRLTIKSLCLSNGGIFPETHRPLLLQKLLKDGGVLSPILTRLMNFFVFSRGLLQYINQRKKFRRRWVGALASVTIPIHFIYGPLDPVNPYPEFLELYRKTLPRSTVSILDDHISHYPQLEDPMGFLNAYMGFINSF

SEQ ID NO: 71422 - protein, 19 aa, Homo sapiens
IGSWASVMRQAHLSVLACC

SEQ ID NO: 71423 - protein, 41 aa, Homo sapiens
MYFFLSHLAVVNIAYACNTVPQMLVNLLHPAKPISFAGCMT

SEQ ID NO: 71424 - protein, 15 aa, Homo sapiens
LALPGAALLLFLNGH

SEQ ID NO: 71425 - protein, 40 aa, Homo sapiens
VSTTAVLLLFPVSFGCSETPGELLLWGMDRGSRNAFVFSQ

SEQ ID NO: 71426 - protein, 19 aa, Homo sapiens
TQLWFLWFWGHLGLACRFS

SEQ ID NO: 71427 - protein, 63 aa, Homo sapiens
RLVFAAFPRLFPVPLPSMLTHWASLAVIPTMTATSVGKAPPGPLPDASPSLRLPARRRPDPVG

SEQ ID NO: 71428 - protein, 66 aa, Homo sapiens
RYPTLWDRCRKRWLRPIFTQLLAAGLAYHTLLPIPSEPLFAAPGEHLHQCFVKESYCPPRVLAKEQ

SEQ ID NO: 71429 - protein, 99 aa, Homo sapiens [sequence omitted]

SEQ ID NO: 71430 - protein, 585 aa, Homo sapiens
IIINFCCCLINVKMSRSPDAKEDPVECPLCMEPLEIDDINFFPCTCGYQICRFCWHRIRTDENGLCPACRKPYPEDPAVYKPLSQEELQRIKNEKKQKQNERKQKISENRKHLASVRVVQKNLVFVVGLSQRLADPEVLKRPEYFGKFGKIHKVVINNSTSYAGSQGPSASAYVTYIRSEDALRAIQCVNNVVVDGRTLKASLGTTKYCSYFLKNMQCPKPDCMYLHELGDEAASFTKEEMQAGKHQEYEQKLLQELYKLNPNFLQLSTGSVDKNKNKVTPLQSPIDKPSDSLSIGNGDNSQQISNSDTPSPPPGLSKSNPVIPISSSNHSARSPFEGAVTESQSLFSDNFRHPNPIPSGLPPFPSSPQTSSDWPTAPEPQSLFTSETIPVSSSTDWQAAFGFGSSKQPEDDLGFDPFDVTRKALADLIEKELSVQDQPSLSPTSLQNSSSHTTTAKGPGSGFLHPAAATNANSLNSTFSVLPQRFPQFQQHRAVYNSFSFPGQAARYPWMAFPRNSIMHLNHTANPTSNSNFLDLNLPPQHNTGLGGIPVAGEEEVKVSTMPLSTSSHSLQQGQQPTSLHTTVA

SEQ ID NO: 71431 - protein, 28 aa, Homo sapiens
RVFFSLFFQIFCMFKHFHSRKLGGKSVS

SEQ ID NO: 71432 - protein, 14 aa, Homo sapiens
MTIIVLVQLMLYFN

SEQ ID NO: 71433 - protein, 41 aa, Homo sapiens; identical to SEQ ID NO: 71423

SEQ ID NO: 71434 - protein, 20 aa, Homo sapiens
LPFISLFSLSFLNRLLILWL

SEQ ID NO: 71435 - protein, 367 aa, Homo sapiens
VAAGWMLDFLCLSLCRAFRDGRSEDFRRTRNSAEAIIHGLSSLTACQLRTIYICQFLTRIAAGKTLDAQFENDERITPLESALMIWGSIEKEHDKLHEEIQNLIKIQAIAVCMENGNFKEAEEVFERIFGDPNSHMPFKSKLLMIISQKDTFHSFFQHFSYNHMMEKIKSYVNYVLSEKSSTFLMKAAAKVVESKRTRTITSQDKPSGNDVEMETEANLDTRKSVSDKQSAVTESSEGTVSLLRSHKNLFLSKLQHGTQQQDLNKKERRVGTPQSTKKKKESRRATESRIPVSKSQPVTPEKHRARKRQAWLWEEDKNLRSGVRKYGEGNWSKILLHYKFNNRTSVMLKDRWRTMKKLKLISSDSED

SEQ ID NO: 71436 - protein, 86 aa, Homo sapiens
RRLKRCPSRWLCLSAAWSFVQVFSEPDGFTVIFSGLGNNAGGTMHWNDTRPAHFRILKVVLREAVAECLMDSYSLDVHGGRRTAAG

SEQ ID NO: 71437 - protein, 61 aa, Homo sapiens
LGNKKVCMLGLALILSLDDLSILKMMMRPLWKLTFLEVKAAKPLSVKGQRAFSTWAACRLR

SEQ ID NO: 71438 - protein, 12 aa, Homo sapiens
MCYWILLYIFLL

SEQ ID NO: 71439 - protein, 250 aa, Homo sapiens
KVMGNPGTFKRGLLLSALSYLGFETYQVISQAAVVHATAKVEEILEQADYLYESGETEKLYQLLTQYKESEDAELLWRLARASRDVAQLSRTSEEEKKLLVYEALEYAKRALEKNESSFASHKWYAICLSDVGDYEGIKAKIANAYIIKEHFEKAIELNPKDATSIHLMGIWCYTFAEMPWYQRRIAKMLFATPPSSTYEKALGYFHRAEQGKTYLKLHNKKLAAFWLMKAKDYPAHTEEDKQVKRNRSS

SEQ ID NO: 71440 - protein, 45 aa, Homo sapiens
VNQNRETSIIFPMLMQLQLVLWTLMQEMENFALRFHQSYGNTLMS

SEQ ID NO: 71441 - protein, 10 aa, Homo sapiens
TLWFCISICW

SEQ ID NO: 71442 - protein, 42 aa, Homo sapiens
KKPSNLWNSLLCFSFFFLAVESCSLNRARLVWNSWAHVVLPP

SEQ ID NO: 71443 - protein, 17 aa, Homo sapiens
RIFFFFFFLVKMLYLNG

SEQ ID NO: 71444 - protein, 356 aa, Homo sapiens
LLSPGWGAGAAGRRWWMLLAPLLPALLLVRPAGALVEGLYCGTRDCYEVLGVSRSAGKAEIARAYRQLARRYHPDRYRPQPGDEGPGRTPQSAEEAFLLVATAYETLKDEETRKDYDYMLDHPEEYYSHYYHYYSRRLAPKVDVRVVILVSVCAISVFQFFSWWNSYNKAISYLATVPKYRIQATEIAKQQGLLKKAKEKGKNKKSKEEIRDEEENIIKNIIKSKIDIKGGYQKPQICDLLLFQIILAPFHLCSYIVWYCRWIYNFNIKGKEYGEEERLYIIRKSMKMSKSQFDSLEDHQKETFLKRELWIKENYEVYKQEQEEELKKKLANDPRWKRYRRWMKNEGPGRLTFVDD

SEQ ID NO: 71445 - protein, 38 aa, Homo sapiens
IHLDTSSLKTLHLGTLFFLFYLALTQNEENICDGKVTL

SEQ ID NO: 71446 - protein, 82 aa, Homo sapiens
LALQLVVLLWGLYLACPGVSGCGPAGSCSPPSCCCPSSRWWPACSSSRTSTWWPATPPPGNSSPHTASPISASAPATPSTEA

SEQ ID NO: 71447 - protein, 55 aa, Homo sapiens
IHAMWWTLVGSLFWKESVSSWGREGRELSACRVLNEMRDTMMGPSTSGKVFLSPL

SEQ ID NO: 71448 - protein, 75 aa, Homo sapiens
ISFQTSALALALLYSQNWFLRLARVGGRVWEEDRFPPASLGSQEKSLQILRFRVKSQSSFFWSAQNCLCLLPHEE

SEQ ID NO: 71449 - protein, 11 aa, Homo sapiens
LSILLLFYFSF

SEQ ID NO: 71450 - protein, 36 aa, Homo sapiens
LELQWTTFNALVLCTLTSTVMNTQLGQGSEILQRNY

SEQ ID NO: 71451 - protein, 35 aa, Homo sapiens
TLSMGLCWMRVLLTQVYTSISGQQKRRMTQAWCIK

SEQ ID NO: 71452 - protein, 832 aa, Homo sapiens
LPTWKMAARRSLSARGRGILQAAAGRLLPLLLLSCCCGAGGCAAVGENEETVIIGLRLEDTNDVSFMEGGALRVSERTRVKLRVYGQNINNETWSRIAFTEHERRRHSPGERGLGGPAPPEPDSGPQRCGIRTSDIIILPHIILNRRTSGIIEIEIKPLRKMEKSKSYYLCTSLSTPALGAGGSGSTGGAVGGKGGSGVAGLPPPPWAETTWIYHDGEDTKMIVGEEKKFLLPFWLQVIFISLLLCLSGMFSGLNLGLMALDPMELRIVQNCGTEKEKNYAKRIEPVRRQGNYLLCSLLLGNVLVNTTLTILLDDIAGSGLVAVVVSTIGIVIFGEIVPQAICSRHGLAVGANTIFLTKFFMMMTFPASYPVSKLLDCVLGQEIGTVYNREKLLEMLRVTDPYNDLVKEELNIIQGALELRTKTVEDVMTPLRDCFMITGEAILDFNTMSEIMESGYTRIPVFEGERSNIVDLLFVKDLAFVDPDDCTPLKTITKFYNHPLHFVFNDTKLDAMLEEFKKGKSHLAIVQRVNNEGEGDPFYEVLGIVTLEDVIEEIIKSEILDETDLYTDNRTKKKVAHRERKQDFSAFKQTDSEMKVKISPQLLLAMHRFLATEVEAFSPSQMSEKILLRLLKHPNVIQELKYDEKNKKAPEYYLYQRNKPVDYFVLILQGKVEVEAGKEGMKFEASAFSYYGVMALTASPGENKSPPRPCGLNHSDSLSRSDRIDAVTPTLGSSNNQLNSSLLQVYIPDYSVRALSDLQFVKISRQQYQNALMASRMDKTPQSSDSENTKIELTLTELHDGLPDETANLLNEQNCVTHSKANHSLHNEGAI

SEQ ID NO: 71453 - protein, 30 aa, Homo sapiens
MSHVCLKKEWALLLLESNLLIVVITFDCSY

SEQ ID NO: 71454 - protein, 69 aa, Homo sapiens [sequence omitted]

SEQ ID NO: 71455 - protein, 13 aa, Homo sapiens
IRIISKITLLVFC

SEQ ID NO: 71456 - protein, 27 aa, Homo sapiens
LQFWASKFWLLHIFPFVPPALEVVAAF

SEQ ID NO: 71457 - protein, 18 aa, Homo sapiens
ISRILFLLTLFLCACCNA

SEQ ID NO: 71458 - protein, 31 aa, Homo sapiens
LGSWYWITLWSASDWMTFAAASSTAASGSRR

SEQ ID NO: 71459 - protein, 49 aa, Homo sapiens
INLFLTYLIMKVSTMLWFLCWEQSHFLREWEDLSTFLILIQMECQYGNS

SEQ ID NO: 71460 - protein, 41 aa, Homo sapiens
IFGTLLPGTLLIEMAISSLIPTLHFTCVVLKRYIKNFIEVK

SEQ ID NO: 71461 - protein, 39 aa, Homo sapiens
MESRLFYFLYDFWIFVLLRKLLAPSVSQNIIFKKSLIGF

SEQ ID NO: 71462 - protein, 39 aa, Homo sapiens
IHFWLSSLSLLDVMCSFAIVSAYTFTSKGKNNNLVSMIW

SEQ ID NO: 71463 - protein, 14 aa, Homo sapiens
ITFRTLKIFFFFFF

SEQ ID NO: 71464 - protein, 42 aa, Homo sapiens
IFMALWATVFLEIWKRQRARVVLHWDLYVWDEEQVRWSWQRS

SEQ ID NO: 71465 - protein, 34 aa, Homo sapiens
IGFFTAGLLRTFNMLMCIVNLQEGDMICSILEYF

SEQ ID NO: 71466 - protein, 394 aa, Homo sapiens
VAMLQLLYLSLLSGLHGQEEQDQYFEFFPPSPRSVDQVKAQLRTALASGGVLDASGDYRVYRGLLKTTMDPNDVILATHASVDNLLHLSGLLERWEGPLSVSVFAATKEEAQLATVLAYALSSHCPDMRARVAMHLVCPSRYEAAVPDPREPGEFALLRSCQEVFDKLARVAQPGINYALGTNVSYPNNLLRNLAREGANYALVIDVDMVPSEGLWRGLREMLDQSNQWGGTALVVPAFEIRRARRMPMNKNELVQLYQVGEVRPFYYGLCTPCQAPTNYSRWVNLPEESLLRPAYVVPWQDPWEPFYVAGGKVPTFDERFRQYGFNRISQACELHVAGFDFEVLNEGFLVHKGFKEALKFHPQKEAENQHNKILYRQFKQELKAKYPNSPRRC

SEQ ID NO: 71467 - protein, 16 aa, Homo sapiens
IFVHFIITKLISLSSL

SEQ ID NO: 71468 - protein, 9 aa, Homo sapiens
VAFCGIWLF

SEQ ID NO: 71469 - protein, 13 aa, Homo sapiens
IMLGKYPFLAAFL

SEQ ID NO: 71470 - protein, 65 aa, Homo sapiens
LAFLTTPLLCISFFHFLFQAFLFLPCGNSFGASDCSSSECAAIPVDPVPGACSKFSSVRPFAGLV

SEQ ID NO: 71471 - protein, 173 aa, Homo sapiens
LLIFGCIVILIFIMTGIDLKFWHKKMDFSQNVNVSSLSGHNYLCPNDWLLNEGKCYWFSTSFKTWKESQRDCTQLQAHLLVIQNLDELEFIQNSLKPGHFGWIGLYVTFQGNLWMWIDEHFLVPELFSVIGPTDDRSCAVITGNWVYSEDCSSTFKGICQRDAILTHNGTSGV

SEQ ID NO: 71472 - protein, 114 aa, Homo sapiens
LIAFVWFGFFIWFFGRFLKNEPRMENQDKTYTRMKRKSPSEHSKDMGITRENTQASVEDPLNDPSLVCIRSDFNEIVYKSSHLTSENLSSQLNESTSATEADQDPTTSKSTPTN

SEQ ID NO: 71473 - protein, 17 aa, Homo sapiens
MLQNWLAAFCFLFLCPV

SEQ ID NO: 71474 - protein, 22 aa, Homo sapiens
LPAFICIFVGISLVDSISGETP

SEQ ID NO: 71475 - protein, 22 aa, Homo sapiens
VFVFIAFTGKELLVPLTSSVLF

SEQ ID NO: 71476 - protein, 21 aa, Homo sapiens
LAVFNFLFLIFLRWMTPDSYH

SEQ ID NO: 71477 - protein, 15 aa, Homo sapiens
LKTKTTQLILLILIH

SEQ ID NO: 71478 - protein, 263 aa, Homo sapiens
ITNTGLLLIAWGLQRLKSLNLRSCRHLSDVGIGHLAGMTRSAAEGCLGLEQLTLQDCQKLTDLSLKHISRGLTGLRLLNLSFCGGISDAGLLHLSHMGSLRSLNLRSCDNISDTGIMHLAMGSLRLSGLDVSFCDKVGDQSLAYIAQGLDGLKSLSLCSCHISDDGINRMVRQMHGLRTLNIGQCVRITDKGLELIAEHLSQLTGIDLYGCTRITKRGLERITQLPCLKVLNLGLWQMTDSEKEARGDFSPLFTVRTRGSSRR

SEQ ID NO: 71479 - protein, 32 aa, Homo sapiens
LLFPLLLSLILGAFCLASLLAPRVCILSSGGD

SEQ ID NO: 71480 - protein, 33 aa, Homo sapiens
IAMMLGLKFMLVLASHCPLSKCDAHKQVSQHEM

SEQ ID NO: 71481 - protein, 23 aa, Homo sapiens
ITRQFGLKKSLSMCILELCSFIM

SEQ ID NO: 71482 - protein, 69 aa, Homo sapiens
LAYILLFLDFFLIKRLLQCLSCDSGMDICPRLSCWGPSMSLQVPSWSPSPALEAWLRASWRRSFGSMLS

SEQ ID NO: 71483 - protein, 22 aa, Homo sapiens
VYVCVCFILFFFLVVVVEGGRC

SEQ ID NO: 71484 - protein, 34 aa, Homo sapiens
LCLPVSVLNLILSSYLLPVSTSRLPPLPRTNSCS

SEQ ID NO: 71485 - protein, 14 aa, Homo sapiens
TWLSCGLLCVLAAP

SEQ ID NO: 71486 - protein, 50 aa, Homo sapiens
LEFPAELTALALPLLVLIPRAPKYPPWRNLGQDVHSRPIGAVLLKVGSGI

SEQ ID NO: 71487 - protein, 24 aa, Homo sapiens
LPQKWRQTTILTLLAFPLHLLPQD

SEQ ID NO: 71488 - protein, 49 aa, Homo sapiens
ITQSKKKLFLMWILAMEWNQCPFLSVMKLTVESSHSLSTERLCGLEHII

SEQ ID NO: 71489 - protein, 15 aa, Homo sapiens
LSQCRLVFLHILSMA

SEQ ID NO: 71490 - protein, 39 aa, Homo sapiens
ICLLDSWHLCLLCLYHFTAPYQESKWHKFWVRCPSQTRH

SEQ ID NO: 71491 - protein, 13 aa, Homo sapiens
MIAVGFSQWALLC

SEQ ID NO: 71492 - protein, 38 aa, Homo sapiens
LRTHQRRREVSQGHLLAVSVACVALAPRSSISGADVWA

SEQ ID NO: 71493 - protein, 303 aa, Homo sapiens
KKLIAAVVLGILFINTLRCVLRSGEWRSEEQLFRSALSVCPLNAKVHYNIGKNLADKGNQTAAIRYYREAVRLNPKYVHAMNNLGNILKERNELQEAEELLSLAVQIQPDFAAAWMNLGIVQNSLKRFEAAEQSYRTAIKHRRKYPDCYYNLGRLYADLNRHVDALNAWRNATVLKPEHSLAWNNMIILLDNTGNLAQAEAVGREALELIPNDHSLMFSLANVLGKSQKYKESEALFLKAIKANPNAASYHGNLAVLYHRWGHLDLAKKHYEISLQLDPTASGTKENYGLLRRKLELMQKKAV

SEQ ID NO: 71494 - protein, 33 aa, Homo sapiens
RELALLVEMTFLGLWMTIFQRTSLLLPKLFKEA

SEQ ID NO: 71495 - protein, 104 aa, Homo sapiens
LFGLGSLMFLITQEDGHATGRPRTLHPADGCSRDCQTETTPHTQKAPKSQSLILFLERHCIILDHKICVIGFVSKTWDSGDKTSLQGYLCHCILAAFEAKHFNI

SEQ ID NO: 71496 - protein, 18 aa, Homo sapiens
VTVFFWTMGLIISPPCTL

SEQ ID NO: 71497 - protein, 65 aa, Homo sapiens
IFTKVVVLCLYLVQRILDLVPSYQGHHLLKASLMNSDKGYHFQFLLLILAEFSTVHRKLLSSVKT

SEQ ID NO: 71498 - protein, 54 aa, Homo sapiens
KKEKAVIMHLALCLVGFIVSNSPSCLLPMVDMFKALCKNKPVSKQSWKNMVRMV

SEQ ID NO: 71499 - protein, 28 aa, Homo sapiens
ISCYLNLNLSELYLFLMMSVLQSDRFIK

SEQ ID NO: 71500 - protein, 21 aa, Homo sapiens
MQTMWSLMGMVLKLLLDLVIF

SEQ ID NO: 71501 - protein, 18 aa, Homo sapiens
MPFRMNFFFSRIFLSILG

SEQ ID NO: 71502 - protein, 15 aa, Homo sapiens
MMWCGLFGLSFFLRF

SEQ ID NO: 71503 - protein, 15 aa, Homo sapiens
IFICFIYFKILYFNM

SEQ ID NO: 71504 - protein, 81 aa, Homo sapiens
VGTGFNASFLCFCLSFGETLALGLGASQDPGWQRLPSEVPCPGWAPTVTQRTGLGRRPAAPHWGDLLGGRHQFANEATHLI

SEQ ID NO: 71505 - protein, 47 aa, Homo sapiens
IFFPCVYFLLFFKIRRKKVPSKWAFYKKYESYFSCPAREGGGDRAPL

SEQ ID NO: 71506 - protein, 26 aa, Homo sapiens
LVGTSALWELVFGGLMVMLKSYCVGN

SEQ ID NO: 71507 - protein, 13 aa, Homo sapiens
IIEIIIVPLSGLL

SEQ ID NO: 71508 - protein, 11 aa, Homo sapiens
LISSVFTFWIL

SEQ ID NO: 71509 - protein, 41 aa, Homo sapiens
MKKNIWLLSGSRQQYLIALWRLLLLEIYISEGTHSTEEDSK

SEQ ID NO: 71510 - protein, 42 aa, Homo sapiens
LPFYLLFWNLVSPLFASPFPQPFLLPSSTIPPQLHTGSKCER

SEQ ID NO: 71511 - protein, 31 aa, Homo sapiens
IGLNWSLFMLSGIPGVSLKSCLPIPENIMAT

SEQ ID NO: 71512 - protein, 60 aa, Homo sapiens
KPVLGLFQFIISGRLLLVLLGEVLDLLLEPLLPLFQSFHGAGKVLQLLLRVGELQGQRPG

SEQ ID NO: 71513 - protein, 17 aa, Homo sapiens
IVLNILAALAAFALEFL

SEQ ID NO: 71514 - protein, 43 aa, Homo sapiens
IIMGIISLTVTCGLLVASHWRREATKYARWIAFTGKCVHSSHT

SEQ ID NO: 71515 - protein, 1161 aa, Homo sapiens
RTRAALLLFTALATSLGFNLDTEELTAFRVDSAGFGDSVVQYANSWVVVGAPQKITAANQTGGLYQCGYSTGACEPIGLQVPPEAVNMSLGLSLASTTSPSQLLACGPTVHHECGRNMYLTGLCFLLGPTQLTQRLPVSRQECPRQEQDIVFLIDGSGSISSRNFATMMNFVRAVISQFQRPSTQFSLMQFSNKFQTHFTFEEFRRSSNPLSLLASVHQLQGFTYTATAIQNVVHRLFHASYGARRDAAKILIVITDGKKEGDSLDYKDVIPMADAAGIIRYAIGVGLAFQNRNSWKELNDIASKPSQEHIFKVEDFDALKDIQNQLKEKIFAIEGTETTSSSSFELEMAQEGFSAVFTPDGPVLGAVGSFTWSGGAFLYPPNMSPTFINMSQENVDMRDSYLGYSTELALWKGVQSLVLGAPRYQHTGKAVIFTQVSRQWRMKAEVTGTQIGSYFGASLCSVDVDSDGSTDLVLIGAPHYYEQTRGGQVSVCPLPRGWRRWWCDAVLYGEQGHPWGRFGAALTVLGDVNGDKLTDVVIGAPGEEENRGAVYLFHGVLGPSISPSHSQRIAGSQLSSRLQYFGQALSGGQDLTQDGLVDLAVGARGQVLLLRTRPVLWVGVSMQFIPAEIPRSAFECREQVVSEQTLVQSNICLYIDKRSKNLLGSRDLQSSVTLDLALDPGRLSPRATFQETKNRSLSRVRVLGLKAHCENFNLLLPSCVEDSVTPITLRLNFTLVGKPLLAFRNLRPMLAADAQRYFTASLPFEKNCGADHICQDNLGISFSFPGLKSLLVGSNLELNAEVMVWNDGEDSYGTTITFSHPAGLSYRYVAEGQKQGQLRSLHLTCDSAPVGSQGTWSTSCRINHLIFRGGAQITFLATFDVSPKAVLGDRLLLTANVSSENNTPRTSKTTFQLELPVKYAVYTVVSSHEQFTKYLNFSESEEKESHVAMHRYQVNNLGQRDLPVSINFWVPVELNQEAVWMDVEVSHPQNPSLRCSSEKIAPPASDFLAHIQKNPVLDCSIAGCLRFRCDVPSFSVQEELDFTLKGNLSFGWVRQILQKKVSVVSVAEITFDTSVYSQLPGQEAFMRAQTTTVLEKYKVHNPTPLIVGSSIGGLLLLALITAVLYKVGFFKRQYKEMMEEANGQIAPENGTQTPSPPSEK

SEQ ID NO: 71516 - protein, 67 aa, Homo sapiens
LCLSSYAVLMCLLSIWQRDKRDTSNFDKEFTRQPVELTPTDKLFIMNLDQNEFAGFSYTNPEFVINV

SEQ ID NO: 71517 - protein, 58 aa, Homo sapiens
KSLQTNTRSYLFYLTISLYPLTILPSLPPLPFPISGKHPSTLCLQEFNCFSFLAPTNK

SEQ ID NO: 71518 - protein, 16 aa, Homo sapiens
MFKIAAFMCILYCMLL

SEQ ID NO: 71519 - protein, 45 aa, Homo sapiens
TIYLNGYKVHVISLRSFLLMCCSSSWLVKTIRVIQGLETERSTAK

SEQ ID NO: 71520 - protein, 17 aa, Homo sapiens
LACFGLLLLHFLLLLLL

SEQ ID NO: 71521 - protein, 511 aa, Homo sapiens
TGRWLLLRLALFGFLWEASGGLDSGASRDDDLLLPYPRARARLPRDCTRVRAGNREHESWPPPPATPGAGGLAVRTFVSHFRDRAVAGHLTRAVEPLRTFSVLEPGGPGGCAARRRATVEETARAADCRVAQNGGFFRMNSGECLGNVVSDERRVSSSGGLQNAQFGIRRDGTLVTGYLSEEEVLDTENPFVQLLSGVVWLIRNGSIYINESQATECDETQETGSFSKFVNVISARTAIGHDRKGQLVLFHADGQTEQRGINLWEMAEFLLKQDVVNAINLDGGGSATFVLNGTLASYPSDHCQDNMWRCPRQVSTVVCVHEPRCQPPDCHGHGTCVDGHCQCTGHFWRGPGCDELDCGPSNCSQHGLCTETGCRCDAGWTGSNCSEECPLGWHGPGCQRPCKCEHHCPCDPKTGNCSVSRVKQCLQPPEATLRAGELSFFTRTAWLALTLALAFLLLISTAANLSLLLSRAERNRRLHGDYAYHPLQEMNGEPLAAEKEQPGGAHNPFKD

SEQ ID NO: 71522 - protein, 116 aa, Homo sapiens
TFGRWPLLSLLLLLLLLQPVTCAYTTPGPPRALTTLGAPRAHTMPGTYAPSTTLSSPSTQGLQEQARALMRDFPLVDGSGQPMCHARPRTGMPCASPWSRLTSYAACVPPILSWSL

SEQ ID NO: 71523 - protein, 8 aa, Homo sapiens
ILPVFLIA

SEQ ID NO: 71524 - protein, 15 aa, Homo sapiens
MPRTCFHFVFMLVLV

SEQ ID NO: 71525 - protein, 29 aa, Homo sapiens
KIHFIFITMGRILLLSSLGQTSEDFSDGS

SEQ ID NO: 71526 - protein, 28 aa, Homo sapiens
LQLILLEFLIQLVTVARGCWPAPFLKYS

SEQ ID NO: 71527 - protein, 27 aa, Homo sapiens
LQLISCFLAILSLSSSIPQLSLSRTGL

SEQ ID NO: 71528 - protein, 46 aa, Homo sapiens
LGLIILLLWKCGFFKRARTRALYEAKRQKAEMKSQPSETERLTDDY

SEQ ID NO: 71529 - protein, 11 aa, Homo sapiens
VSVTIGLLLRV

SEQ ID NO: 71530 - protein, 224 aa, Homo sapiens
LGLGLALACLGLLLAVVSLGSRASLSAQEPAQEELVAEEDQDPSELNPQTEESQDPAPFLNRLVRPRRSAPKGRKTRARRAIAAHYEVHPRPGQDGAQAGVDGTVSGWEEARINSSSPLRYNRQIGEFIVTRAGLYYLYCQVHFDEGKAVYLKLDLLVDGVLALRCLEEFSATAASSLGPQLRLCQVSGLLALRPGSSLRIRTLPWAHLKAAPFLTYFGLFQVH

SEQ ID NO: 71531 - protein, 20 aa, Homo sapiens
LVFDFPFLFLISPILVHASF

SEQ ID NO: 71532 - protein, 684 aa, Homo sapiens
LQAPSTLEALLQSLVIVLLGFRSLLSDLCSYEVLNLLTAQQYEIFSRSFHKNRELFVHGLPGLGKTIMAMKIMEKIRNVFHCEAHRILYICESQFLRNFIRKEFLRGNGLAAGKMNISIDLDTNYAELVLNVGRVTLGENNRKKMKDCQLRKQQNENVSRAVCALLNSGGGVIKAEVENKGYSYKKDGIGLDLENSFSNMLPFVPNFLDFMQNGNYFHIFVKSWSLETSGPQIATLSSSLYKRDVTSAKVMNASAALEFLKDMEKTGGRAYLRPEFPAKRACVDVQEESNMEALAADFFNRTELGYKEKLTFTESTHVEIKNFSTEKLLQRITEILPQYVSAFANTDGGYLFVGLNEDKEVIGFKAEKSYLTKLEEVTKNSIGKLPVHHFCVEKGTINYLCKFLGVYDKGRLCGYVYALRVERFCCAVFAKKPDSWHVKDNRVKQLTEKEWIQFMVDSEPVCEELPSPASTSSPVSQSYPLREYINFKIQPLRYHLPGLSEKITCAPKTFCRNLFSQHEGLKQLICEEMGSVNKGSLIFSRSWSLDLGLQENHKVLCDALLISQDKPPVLYTFHMVQDEEFKDYSTQTAQTLKQKLAKIGGYTKKVCVMTKIFYLSPEGKTSCQYDLNSQVIYPESYYWTTAQTMKDLEKALSNILPKENQIFLFVCLFRFCLFVCWFVCFFLR

SEQ ID NO: 71533 - protein, 10 aa, Homo sapiens
VGFFLWGGVV

SEQ ID NO: 71534 - protein, 24 aa, Homo sapiens
MSWAWVAWKWSLIMLKMLPNGAVS

SEQ ID NO: 71535 - protein, 45 aa, Homo sapiens
IHDMNRMELLKLLLTCFSEAMYLPPAPESGSTNPWVQFFCSTENR

SEQ ID NO: 71536 - protein, 38 aa, Homo sapiens
LSFSPFPSLGLSFSLAALGWSLRARGDCQRCPLSVTGP

SEQ ID NO: 71537 - protein, 317 aa, Homo sapiens
LAAALAALLLLPLPLPRAPAPARTPAPAPRAPPSRPAAPSLRPDDVFIAVKTTRKNHGPRLRLLLRTWISRARQQTFIFTDGDDPELELQGGDRVINTNCSAVRTRQALCCKMSVEYDKFIESGRKWFCHVDDDNYVNARSLLHLLSSFSPSQDVYLGRPSLDHPIEATERVQGGRTVTTVKFWFATGGAGFCLSRGLALKMSPWASLGSFMSTAEQVRLPDDCTVGYIVEGLLGARLLHSPLFHSHLENLQRLPPDTLLQQVTLSHGGPENPHNVVNVAGGFSLHQDPTRFKSIHCLLYPDTDWCPRQKQGAPTSR

SEQ ID NO: 71538 - protein, 25 aa, Homo sapiens
IFLFLFMMNKVKIKALDKLNLAEFN

SEQ ID NO: 71539 - protein, 606 aa, Homo sapiens
LFALLLLCALLARLQVALQIAPPCTSEKHYEHLGRCCNKCEPGKYMSSKCTTTSDSVCLPCGPDEYLDSWNEEDKCLLHKVCDTGKALVAVVAGNSTTPRRCACTAGYHWSQDCECCRRNTECAPGLGAQHPLQLNKDTVCKPCLAGYFSDAFSSTDKCRPWTNCTFLGKRVEHHGTEKSDAVCSSSLPARKPPNEPHVYLPGLIILLLFASVALVAAIIFGVCYRKKGKALTANLWHWINEACGRLSGDKESSGDSCVSTHTANFGQQGACEGVLLLTLEEKTFPEDMCYPDQGGVCQGTCVGGGPYAQGEDARMLSLVSKTEIEEDSFRQMPTEDEYMDRPSQPTDQLLFLTEPGSKSTPPFSEPLEVGENDSLSQCFTGTQSTVGSESCNCTEPLCRTDWTPMSSENYLQKEVDSGHCPHWAASPSPNWADVCTGCRNPPGEDCEPLVGSPKRGPLPQCAYGMGLPPEEEASRTEARDQPEDGADGRLPSSARAGAGSGSSPGGQSPASGNVTGNSNSTFISSGQVMNFKGDIIVVYVSQTSQEGAAAAAEPMGRPVQEETLARRDSFAGNGPRFPDPCGGPEGLREPEKASRPVQEQGGAKA

SEQ ID NO: 71540 - protein, 74 aa, Homo sapiens
VVVFIWGFAYLVVRFCESLLILPDVSCGVKSTRPPPLSLRVRGIRGDPVTKDIEEKNKSLAFFFLIACFSPPPN

SEQ ID NO: 71541 - protein, 16 aa, Homo sapiens
MIMFLFNILSMHLLFY

SEQ ID NO: 71542 - protein, 18 aa, Homo sapiens
MYKSKWEAISFAWLCTTA

SEQ ID NO: 71543 - protein, 17 aa, Homo sapiens
MYSVQCLMLWLIFRKLL

SEQ ID NO: 71544 - protein, 41 aa, Homo sapiens [sequence omitted]

SEQ ID NO: 71545 - protein, 596 aa, Homo sapiens
ILTARSRWRLRNSISAFLFTVTFAWCPPGLSNLTILSCPDHLSQDVFCLHESKFEEERMVAGWLTNYSQDSVTFEDVAVDFTQEEWTLLDQTQRNLYRDVMLENYKNLVAVDWESHINTKWSAPQQNFLQGKTSSVVEMERNHFGEELFDFNQCEKALSEHSCLKTHRRTYFRKKTCECNQCEKAFRKPSIFTLHKKTDIGEELPNCNQCETAFSQHLHLVCKKTSQNLHLVCKKTHTQEKPYKCSDCEKGLPSSSHLRECVRIYGGERPYTHKEYVETFSHSTALFVHMQTQDGEKFYECKACGKPFTESSYLTQHLRTHSRVLPIEHKKFGKAFAFSPDLAKHIRLRTRGKHYVCNECGKEFTCFSKLNIHIRVHTGEKPYECNKCGKAFTDSSGLIKHRRTHTGEKPYECKECGKAFANSSHLTVHMRTHTGEKPYQCKECGKAFINSSSFKSHMQTHPGVKPYDCQQCGKAFIRSSFLIRHLRSHSAERPFECEECGKAFRYSSHLSQHKRIHTGERPYKCQKCGQAFSISSGLTVHMRTHTGERPFECQECGKAFTRSTYLIRHLRSHSVEKPYKECGQTFSNSSCLTECV

SEQ ID NO: 71546 - protein, 63 aa, Homo sapiens
RFCAGPRLLWLFRFGFFSLPMSVLGFHVLQRRGAAPPPLTSLGARWTGPGWERPAHLSPREGS

SEQ ID NO: 71547 - protein, 507 aa, Homo sapiens
VAAALARLLAAFLLLAAQVACEYGMVHVVSQAGGPEGKDYCILYNPQWAHLPHDLSKASFLQLRNWTASLLCSAADLPARGFSNQIPLVARGNCTFYEKVRLAQGSGARGLLIVSRERLVPPGGNKTQYDEIGIPVALLSYKDMLDIFTRFGRTVRAALYAPKEPVLDYNMVIIFIMAVGTVAIGGYWAGSRDVKKRYMKHKRDDGPEKQEDEAVDVTPVMTCVFVVMCCSMLVLLYYFYDLLVYVVIGIFCLASATGLYSCLAPCVRRLPFGKCRIPNNSLPYFHKRPQARMLLLALFCVAVSVVWGVFRNEDQWAWVLQDALGIAFCLYMLKTIRLPTFKACTLLLLVLFLYDIFFVFITPFLTKSGSSIMVEVATGPSDSATREKLPMVLKVPRLNSSPLALCDRPFSLLGFGDILVPGLLVAYCHRFDIQVQSSRVYFVACTIAYGVGLLVTFVALALMQRGQPALLYLVPCTLVTSCAVALWRRELGVFWTGSGFAVNTSLL

SEQ ID NO: 71548 - protein, 588 aa, Homo sapiens
VAAALARLLAAFLLLAAQVACEYGMVHVVSQAGGPEGKDYCILYNPQWAHLPHDLSKASFLQLRNWTASLLCSAADLPARGFSNQIPLVARGNCTFYEKVRLAQGSGARGLLIVSRERLVPPGGNKTQYDEIGIPVALLSYKDMLDIFTRFGRTVRAALYAPKEPVLDYNMVIIFIMAVGTVAIGGYWAGSRDVKKRYMKHKRDDGPEKQEDEAVDVTPVMTCVFVVMCCSMLVLLYYFYDLLVYVVIGIFCLASATGLYSCLAPCVRRLPFGKCRIPNNSLPYFHKRPQARMLLLALFCVAVSVVWGVFRNEDQWAWVLQDALGIAFCLYMLKTIRLPTFKACTLLLLVLFLYDIFFVFITPFLTKSGSSIMVEVATGPSDSATREKLPMVLKVPRLNSSPLALCDRPFSLLGFGDILVPGLLVAYCHRFDIQVQSSRVYFVACTIAYGVGLLVTFVALALMQRGQPALLYLVPCTLVTSCAVALWRRELGVFWTGSGFAKVLPPSPWAPAPADGPQPPKDSATPLSPQPPSEEPATSPWPAEQSPKSRTSEEMGAGAPMREPGSPAESEGRDQAQPSPVTQPGASA

SEQ ID NO: 71549 - protein, 87 aa, Homo sapiens
TMRAKGFLAPSLVLAVSLELMHPDANSPSECRGDETLTGQFNLYMGDKLEGKTNGRRVKRKLNYCANTRHSNPGGYCRVNNDRYYFV

SEQ ID NO: 71550 - protein, 26 aa, Homo sapiens
VNFQVIFPSLSFAAASLGCLNSVPPP

SEQ ID NO: 71551 - protein, 276 aa, Homo sapiens
VLGLLVQIWALQEASSLSVQQGPNLLQVRQGSQATLVCQVDQATAWERLRVKWTKDGAILCQPYITNGSLSLGVCGPQGRLSWQAPSHLTLQLDPVSLNHSGAYVCWAAVEIPELEEAEGNITRLFVDPDDPTQNRNRIASFPGFLFVLLGVGSMGVAAIVWGAWFWGRRSCQQRDSGNSPGNAFYSNVLYRPRGAPKKSEDCSGEGKDQRGQSIYSTSFPQPAPRQPHLASRPCPSPRPCPSPRPGHPVSMVRVSPRPSPTQQPRPKGFPKVGEE

SEQ ID NO: 71552 - protein, 17 aa, Homo sapiens
KTPGPSGSLEMVLLCLI

SEQ ID NO: 71553 - protein, 340 aa, Homo sapiens
TPDACPRPGMSRYLLPLSALGTVAGAAVLLKDYVTGGACPSKATIPGKTVIVTGANTGIGKQTALELARRGGNIILACRDMEKCEAAAKDIRGETLNHHVNARHLDLASLKSIREFAAKIIEEEERVDILINNAGVMRCPHWTTEDGFEMQFGVNHLGHFLLTNLLLDKLKASAPSRIINLSSLAHVAGHIDFDDLNWQTRKYNTKAAYCQSKLAIVLFTKELSRRLQGSGVTVNALHPGVARTELGRHTGIHGSTFSSTTLGPIFWLLVKSPELAAQPSTYLAVAEELADVSGKYFDGLKQKAPAPEAEDEEVARRLWAESARLVGLEAPSVREQPLPR

SEQ ID NO: 71554 - protein, 23 aa, Homo sapiens
LLLGEMLSMFLGVFICFLVETCC

SEQ ID NO: 71555 - protein, 16 aa, Homo sapiens
MFCFVLFFGLFLYYKK

SEQ ID NO: 71556 - protein, 19 aa, Homo sapiens
MSFVCSLTFSLAFLLCGCL

SEQ ID NO: 71557 - protein, 14 aa, Homo sapiens
LVLLLFFFFSSCMR

SEQ ID NO: 71558 - protein, 10 aa, Homo sapiens
ICILCLLLRI

SEQ ID NO: 71559 - protein, 40 aa, Homo sapiens
LCLLVVVAVAIGWVCRDRCLQHSYAGAWAVSPETELTGHV

SEQ ID NO: 71560 - protein, 60 aa, Homo sapiens
ILFIPSLVWLLLQTQRDQRRLKKVEKLRHKKRAVKMWATSLKPRRRMKKKERQPQKRRKK

SEQ ID NO: 71561 - protein, 11 aa, Homo sapiens
IFLLQMVLLFV

SEQ ID NO: 71562 - protein, 11 aa, Homo sapiens
MLFKVLLYCLT

SEQ ID NO: 71563 - protein, 40 aa, Homo sapiens; identical to SEQ ID NO: 71559

SEQ ID NO: 71564 - protein, 21 aa, Homo sapiens
KNYLLFAWWFFIMDLAQKKNC

SEQ ID NO: 71565 - protein, 12 aa, Homo sapiens
KKPYFRLCFVFV

SEQ ID NO: 71566 - protein, 35 aa, Homo sapiens
LLSALGMGICVFLYYCWLRTQSFEACPDAGPGTRV

SEQ ID NO: 71567 - protein, 24 aa, Homo sapiens
LAVLVAFLSMCGTVAQCGSWFKFS

SEQ ID NO: 71568 - protein, 16 aa, Homo sapiens
IFTALGIVMGQVVGLR

SEQ ID NO: 71569 - protein, 54 aa, Homo sapiens; identical to SEQ ID NO: 64594

SEQ ID NO: 71570 - protein, 21 aa, Homo sapiens
LHFKGTLLSHYILLFLDFFCV

SEQ ID NO: 71571 - protein, 12 aa, Homo sapiens
MIKFRVFLTAFV

SEQ ID NO: 71572 - protein, 27 aa, Homo sapiens
MEAFCSRRILCFNLAMCFACCWADDVY

SEQ ID NO: 71573 - protein, 19 aa, Homo sapiens
LCSLMLGLLGLQRWAPLLA

SEQ ID NO: 71574 - protein, 42 aa, Homo sapiens
MFSEAWVVLLCLSCMMKSRSTHKLFPRIFPPVNRHVVLYNIS

SEQ ID NO: 71575 - protein, 66 aa, Homo sapiens
RHLPGFHTYTNLLFLLLPSLLMGYSESPPPITDSWAPFISLTHHVLSQSQSPLSSNCWICLSTHTQ

SEQ ID NO: 71576 - protein, 50 aa, Homo sapiens
ILVLTLGFWLLQLNMVPIDTDIRVGKDFVHRPKTLKGKSFHFGKGDIDFV

SEQ ID NO: 71577 - protein, 14 aa, Homo sapiens
KHASSFLFIGYIPL

SEQ ID NO: 71578 - protein, 15 aa, Homo sapiens
KNKGSCCLFSLWVGL

SEQ ID NO: 71579 - protein, 35 aa, Homo sapiens
MHAEMVLILIATLVVAQLLLVQWKQRHPRSYNVGL

SEQ ID NO: 71580 - protein, 13 aa, Homo sapiens
MKFFFKVLKFLAT

SEQ ID NO: 71581 - protein, 100 aa, Homo sapiens
MSSRRHPAAFAFLVHLSLTCLALSPLLVSRSEYLFVRSQRKEMMQREGSKNKTKRTLKVYEKKKLKRKCLPHSLKNSTIEQRLTSRKPQVYQSQMLAVEA

SEQ ID NO: 71582 - protein, 263 aa, Homo sapiens
LRLVLYLTFLGAPCYAPALPSCKEDEYPVGSECCPKCSPGYRVKEACGELTGTVCEPCPPGTYIAHLNGLSKCLQCQMCDPAMGLRASRNCSRTENAVCGCSPGHFCIVQDGDHCAACRAYATSSPGQRVQKGGTESQDTLCQNCPPGTFSPNGTLEECQHQTKCSWLVTKAGAGTSSSHWVWWFLSGSLVIVIVCSTVGLIICVKRRKPRGDVVKVIVSVQRKRQEAEGEATVIEALQAPPDVTTVAVEETIPSFTGRSPNH

SEQ ID NO: 71583 - protein, 24 aa, Homo sapiens
LRVCGLVLWRLLLELEHLPVSIKD

SEQ ID NO: 71584 - protein, 14 aa, Homo sapiens
IWVIFIFIFLGLQA

SEQ ID NO: 71585 - protein, 14 aa, Homo sapiens
ILYFGLPWFSLSLI

SEQ ID NO: 71586 - protein, 20 aa, Homo sapiens
RWFVFLLSSIGLDLVYSGRR

SEQ ID NO: 71587 - protein, 24 aa, Homo sapiens
KPSFLPRMVIETFLLMGLLLVIEP

SEQ ID NO: 71588 - protein, 25 aa, Homo sapiens
KPLFKEMVLCSVFVLLISLEVLDEG

SEQ ID NO: 71589 - protein, 47 aa, Homo sapiens
LLCLYLVGFLDLFGVSMVVPLLSLHVKSLGASPTVAGIVDDVCSKRF

SEQ ID NO: 71590 - protein, 10 aa, Homo sapiens
LLLFLLLELF

SEQ ID NO: 71591 - protein, 23 aa, Homo sapiens
ILRTGIFVSALLMYPQQPELPDI

SEQ ID NO: 71592 - protein, 91 aa, Homo sapiens
MGAQRYPHPWHQTSVCLIAACCCSTKTLAPPGSGTGTSCCSSPMCSSSSSCSGSFHLLGRRSASPPAPFLSPSTSWCLWWRWWALPGPWYP

SEQ ID NO: 71593 - protein, 9 aa, Homo sapiens
LLFLYFVLF

SEQ ID NO: 71594 - protein, 55 aa, Homo sapiens
IPAIRFLLGFLELWSVWASTSDSCAGSAGPEHGCVRSGSSQKWLQKKILSTFQGT

SEQ ID NO: 71595 - protein, 45 aa, Homo sapiens
KGLQGDGLGGRRFLFLLPFCLCSPNVPVSPLPHLGPLFGPCGQSC

SEQ ID NO: 71596 - protein, 93 aa, Homo sapiens
LKSGGTSLSFLVLVTGCTSVGRIPDAEIYKITATDFYPLQEEAKEEERLIALKKILSSGVFYFSWPNDGSRFDLTVRTQKQGDDSSEWGNSFF

SEQ ID NO: 71597 - protein, 67 aa, Homo sapiens
MLVLLWLGWISSKSMLAAYFVAPKYPLKLALVSEPESSSLILKFLSLKDFLCCYTTKLSVNPPLLND

SEQ ID NO: 71598 - protein, 14 aa, Homo sapiens
LLLMIVRTTSFLLL

SEQ ID NO: 71599 - protein, 412 aa, Homo sapiens
RPGPRVPKTLVLVVAAVLLLVSAESALITQQDLAPQQRAAPQQKRSSPSEGLCPPGHHISEDGRDCISCKYGQDYSTHWNDLLFCLRCTRCDSGEVELSPCTTTRNTVCQCEEGTFREEDSPEMCRKCRTGCPRGMVKVGDCTPWSDIECVHKESGTKHSGEVPAVEETVTSSPGTPASPCSLSGIIIGVTVAAVVLIVAVFVCKSLLWKKVLPYLKGICSGGGGDPERVDRSSQRPGAEDNVLNEIVSILQPTQVPEQEMEVQEPAEPTGVNMLSPGESEHLLEPAEAERSQRRRLLVPANEGDPTETLRQCFDDFADLVPFDSWEPLMRKLGLMDNEIKVAKAEAAGHRDTLYTMLIKWVNKTGRDASVHTLLDALETLGERLAKQKIEDHLLSSGKFMYLEGNADSAMS

SEQ ID NO: 71600 - protein, 91 aa, Homo sapiens
KTSLCFILFDFSSLWVIAPSLFNGSLPASILVLWERPAFWCCSQEWSLTALWKPHRRKTLICPRSCLTPPLDRPSPRFYTVLPARRHDEAM

SEQ ID NO: 71601 - protein, 8 aa, Homo sapiens
VFLLMLGV

SEQ ID NO: 71602 - protein, 29 aa, Homo sapiens
IVTFPVMASFLSPLPTVLLRAGSTPWSTP

SEQ ID NO: 71603 - protein, 27 aa, Homo sapiens
KSLGKLLVWVLLASKLAVGRASETTQG

SEQ ID NO: 71604 - protein, 19 aa, Homo sapiens
LWWLLLCVINSGKFHLLHI

SEQ ID NO: 71605 - protein, 43 aa, Homo sapiens
KWYKILLIYFLIMLISNEDSCLKIFFNLMVSIFCKNHVNLFHS

SEQ ID NO: 71606 - protein, 37 aa, Homo sapiens
LGGFILLLAALPSWDTCNKQLPKPAPTTFLYKVASNV

SEQ ID NO: 71607 - protein, 37 aa, Homo sapiens
KFFLLASGCLCGFILLGGCSAEELTAERVWKPPTVAA

SEQ ID NO: 71608 - protein, 19 aa, Homo sapiens
IGSSVWNYLLELCVCLKLL

SEQ ID NO: 71609 - protein, 11 aa, Homo sapiens
VYFSFLFLMNQ

SEQ ID NO: 71610 - protein, 20 aa, Homo sapiens
VCLSVAFPGMWILLSSLSTS

SEQ ID NO: 71611 - protein, 18 aa, Homo sapiens
ILKSSLYYLLMPGCLTTL

SEQ ID NO: 71612 - protein, 14 aa, Homo sapiens
VFSISLLLLGHIYA

SEQ ID NO: 71613 - protein, 403 aa, Homo sapiens
LAFVIPVVQALLSRVVCHIRALVVLPTKELAQQVSKVFNIYTDATPLRVSLVTGQKSLAKEQESLVQKTADGYRCLADIVVATPGRLVDHIDQTPGFSLQQLRFLIIDEADRMIDSMHQSWLPRVVAAAFQSEDPADPCALLQRRQAQAVTAASTCCPQMPLQKLLFSATLTQNPEKLQQLGLHQPRLFSTGLAHRGLEDTDGDGDSGKYAFPVGLTHHYVPCSLSSKPLVVLHLVLEMGFSRVLCFTNSRENSHRLFLLVQAFGGVDVAEFSSRYGPGQRRMILKQFEQGKIQLLISTDATARGIDVQGVELVVNYDAPQYLRTYVHRVGRTARAGKTGQAFTLLLKVQERRFLRMLTEAGAPELQRHELSSKLLQPLVPRYEEALSQLEESVKEERKQRAA

SEQ ID NO: 71614 - protein, 18 aa, Homo sapiens
ILVIVYLPIVRCLINLAF

SEQ ID NO: 71615 - protein, 8 aa, Homo sapiens
VLFFLKLW

SEQ ID NO: 71616 - protein, 16 aa, Homo sapiens
LFAFGLASFIFLIHRG

SEQ ID NO: 71617 - protein, 9 aa, Homo sapiens
ITWFSIMVI

SEQ ID NO: 71618 - protein, 788 aa, Homo sapiens
LLWVVAATGTLVLLAADAQGQKVFTNTWAVRIPGGPAVANSVARKHGFLNLGQIFGDYYHFWHRGVTKRSLSPHRPRHSRLQREPQVQWLEQQVAKRRTKRDVYQEPTDPKFPQQWYLSGVTQRDLNVKAAWAQGYTGHGIVVSILDDGIEKNHPDLAGNYDPGASFDVNDQDPDPQPRYTQMNDNRHGTRCAGEVAAVANNGVCGVGVAYNARIGGVRMLDGEVTDAVEARSLGLNPNHIHIYSASWGPEDDGKTVDGPARLAEEAFFRGVSQGRGGLGSIFVWASGNGGREHDSCNCDGYTNSIYTLSISSATQFGNVPWYSEACSSTLATTYSSGNQNEKQIVTTDLRQKCTESHTGTSASAPLAAGIIALTLEANKNLTWRDMQHLVVQTSKPAHLNANDWATNGVGRKVSHSYGYGLLDAGAMVALAQNWTTVAPQRKCIIDILTEPKDIGKRLEVRKTVTACLGEPNHITRLEHAQARLTLSYNRRGDLAIHLVSPMGTRSTLLAARPHDYSADGFNDWAFMTTHSWDEDPSGEWVLEIENTSEANNYGTLTKFTLVLYGTAPEGLPVPPESSGCKTLTSSQACVVCEEGFSLHQKSCVQHCPPGFAPQVLDTHYSTENDVETIRASVCAPCHASCATCQGPALTDCLSCPSHASLDPVEQTCSRQSQSSRESPPQQQPPRLPPEVEAGQRLRAGLLPSHLPEVVAGLSCAFIVLVFVTVFLVLQLRSGFSFRGVKVYTMDRGLISYKGLPPEAWQEECPSDSEEDEGRGERTAFIKDQSAL

SEQ ID NO: 71619 - protein, 19 aa, Homo sapiens
ISMFLMYSICTLFALIKVR

SEQ ID NO: 71620 - protein, 64 aa, Homo sapiens
VAVHLFALMVSTCLLPHIEAVSNIHNLNSVHQSPHQRLHRYVELAWGFSTALGTFLFLAEVVLR

SEQ ID NO: 71621 - protein, 50 aa, Homo sapiens
ISGRLLLVLLGEVLDLLLEPLLPLFQSFHGAGKVLQLLLRVGELQGQRPG

SEQ ID NO: 71622 - protein, 117 aa, Homo sapiens
TATQYFILLIITDGVISDMEETRHAVVQASKLPMSIIIVGVGNADFAAMEFLDGDSRMLRSHTGEEAARDIVQFVPFREFRNAAKETLAKAVLAELPQQVVQYFKHKNLPPTNSEPA

SEQ ID NO: 71623 - protein, 1220 aa, Homo sapiens
VGQGAGPLGPAVVTAAVVLLLSGVGPAHGSEDIVVGCGGFVKSDVEINYSLIEIKLYTKHGTLKYQTDCAPNNGYFMIPLYDKGDFILKIEPPLGWSFEPTTVELHVDGVSDICTKGGDINFVFTGFSVNGKVLSKGQPLGPAGVQVSLRNTGTEAKIQSTVTQPGGKFAFFKVLPGDYEILATHPTWALKEASTTVRVTNSNANAASPLIVAGYNVSGSVRSDGEPMKGVKFLLFSSLVTKEDVLGCNVSPVPGFQPQDESLVYLCYTVSREDGSFSFYSLPSGGYTVIPFYRGERITFDVAPSRLDFTVEHDSLKIEPVFHVMGFSVTGRVLNGPEGDGVPEAVVTLNNQIKVKTKADGSFRLENITTGTYTIHAQKEHLYFETVTIKIAPNTPQLADIVATGFSVCGQISIIRFPDTVKQMNKYKVVLSSQDKDKSLVTVETDAHGSFCFKANPGTYKVQVMVPEAETRAGLTLKPQTFPLTVTDRPVMDVAFVQFLASVSGKVSCLDTCGDLLVTLQSLSRQGEKRSLQLSGKVNAMTFTFDNVLPGKYKISIMHEDWCWKNKSLEVEVLEDDVSAVEFRQTGYMLRCSLSHAITLEFYQDGNGRENVGIYNLSKGVNRFCLSKPGVYKVTPRSCHRFEQAFYTYDTSSPSILTLTAIRHHVLGTITTDKMMDVTVTIKSSIDSEPALVLGPLKSVQELRREQQLAEIEARRQEREKNGNEEGEERMTKPPVQEMVDELQGPFSYDFSYWARSGEKITVTPSSKELLFYPPSMEAVVSGESCPGKLIEIHGKAGLFLEGQIHPELEGVEIVISEKGASSPLITVFTDDKGAYSVGPLHSDLEYTVTSQKEGYVLTAVEGTIGDFKAYALAGVSFEIKAEDDQPLPGVLLSLSGGLFRSNLLTQDNGILTFSNLSPGQYYFKPMMKEFRFEPSSQMIEVQEGQNLKITITGYRTAYSCYGTVSSLNGEPEQGVAMEAVGQNDCSIYGEDTVTDEEGKFRLRGLLPGCVYHVQLKAEGNDHIERALPHHRVIEVGNNDIDDVNIIVFRQINQFDLSGNVITSSEYLPTLWVKLYKSENLDNPIQTVSLGQSLFFHFPPLLRDGENYVVLLDSTLPRSQYDYILPQVSFTAVGYHKHITLIFNPTRKLPEQDIAQGSYIALPLTLLVLLAGYNHDKLIPLLLQLTSRLQGVGALGQAASDNSGPEDAKRQAKKQKTRRT

SEQ ID NO: 71624 - protein, 10 aa, Homo sapiens
LLHFLLLLLL

SEQ ID NO: 71625 - protein, 336 aa, Homo sapiens
INRKSLRSLTAQLLVLLMSWEGTTHLSVEELKRHYESTHNTPLNPCEYGFMTLTELLKSLPYLVEVFTNDKMEECVKLTSLYLFAKNVRSLLHTYHYQQIFLHEFSMAYTKYVGETLQPKTYGHSSVEELLGAIPQVVWIKGHGHKRIVVLKNDMKSRLSSLSLSPANHENQPSEGERILEVPESHTASELKLGADGSGPSHTEQELLRLTDDSPVDLLCAPVPSCLPSPQLRPDPVILQSADLIQFEERPQEPSEIMILNQEEKMEIPIPGKSKTLTSDSSSSCISAAVPVPPCPSSETSESLLSKDPVESPAKKQPKNRVKLAANFSLAPITKL

SEQ ID NO: 71626 - protein, 867 aa, Homo sapiens
LFGVSLAVLGALGAEEPLPARIWLQLCGAQEAVHSAKEYIKGICEPELEERECYPKDMHCIFVGAESLFLKSLIQDTCADLCILDIGLLGIRGSAEAVVMARSHIQQFVKLFENKENLPSSQKESEVKREFKQFVEAHADNYTMDLLILPTSLKKELLTLTQGEENLFETGDDEVIEMRDSQQTEFTQNAATGLNISRDETVLQEEARNKAGTPVSELTKQMDTVLSSSPDVLFDPINGLTPDEEALSNERICQKRRFSDSEERHTKKQFSLENVQEGEILHDAKTLAGNVIADLSDSSADSENLSPDIKETTEEMEYNILVNFFKTMGYSQEIVEKVIKVYGPSTEPLLLLEEIEKENKRFQEDREFSAGTVYPETNKTKNKGVYSSTNELTTDSTPKKTQAHTQQNMVEKFSQLPFKVEAKPCTSNCRINTFRTVPIEQKHEVWGSNQNYICNTDPETDGLSPSVASPSPKEVNFVSRGASSHQPRVPLFPENGLHQQPEPLLPNNMKSACEKRLGCCSSPHSKPNCSTLSPPMPLPQLLPSVTDARSAGPSDHIDSSVTGVQRFRDTLKIPYKLELKNEPGRTDLKHIVIDGSNVAITHGLKKFFSCRGIAIAVEYFWKLGNRNITVFVPQWRTRRDPNVTEQHFLTQLQELGILSLTPARMVFGERIASHDDRFLLHLADKTGGIIVTNDNFREFVNESVSWREIITKRLLQYTFVGDIFMVPDDPLGRSGPRLEEFLQKEVCLRDMQPLLSALPNVGMFDPSFRVPGTQAASTSHQPPTRIQGAPSSHWLPQQPHFPLLPALPSLQQNLPMPAQRSSAETNELREALLKIFPDSEQRLKIDQILVAHPYMKDLNALSAMVLD

SEQ ID NO: 71627 - protein, 72 aa, Homo sapiens
VVLILALVLAWLSTYVADSGSNQLLGAIVSAGDTSVLHLGHVDHLVAGQGNPEPTELPHPSEANTSLDKKAR

SEQ ID NO: 71628 - protein, 61 aa, Homo sapiens
LVWCLFLNFLGSQPSSAPQMSSLRSDDKVCSTSLKRSCRVWFSCQTASCTYSCKASSRCLR

SEQ ID NO: 71629 - protein, 55 aa, Homo sapiens
LCLCSWVLVLMPSLGKELRRHPTRKRETTSTSRIFKLLSQTVTSLGKMDLIGIWD

SEQ ID NO: 71630 - protein, 19 aa, Homo sapiens
IVAALVWLIDCIKVFDLFF

SEQ ID NO: 71631 - protein, 48 aa, Homo sapiens
KGAPLQFSVCGLLQVLVDLAILGQAYAFARHPQKPAPHAVHPTGTKAL

SEQ ID NO: 71632 - protein, 48 aa, Homo sapiens
RSCTASPRRLKILQLFILWILQKCLTSTKCMSYTIHVLSCFSSGTSTS

SEQ ID NO: 71633 - protein, 68 aa, Homo sapiens
LGILVFLILLGIGIYFYWSKCSREVLWHCHLCPSSTEHASASANGHVSYSAVSRENSSSQDPQTEGTR

SEQ ID NO: 71634 - protein, 18 aa, Homo sapiens
TESCWLMVFFLVLMLAGA

SEQ ID NO: 71635 - protein, 73 aa, Homo sapiens
ICLFWAMIGWLSQDTKAEPLDPEADSHVEVFGDEPEQQLSPIFRNASGQSWFSPPASPFGQSSVQTIQPKRDS

SEQ ID NO: 71636 - protein, 27 aa, Homo sapiens
LPPCPSLVLLSHFLLSVCLSLLPEEMG

SEQ ID NO: 71637 - protein, 12 aa, Homo sapiens
IVTVMMIIAASH

SEQ ID NO: 71638 - protein, 12 aa, Homo sapiens
LITLIFIKHVFI

SEQ ID NO: 71639 - protein, 16 aa, Homo sapiens
LEVIFFSILVTYLHDG

SEQ ID NO: 71640 - protein, 39 aa, Homo sapiens
IMPSRLLENTVLIMLATTSGWMSMTLQTCPVPSLCSLGW

SEQ ID NO: 71641 - protein, 21 aa, Homo sapiens
RCSRVLLVWFCTRLAPSHLLG

SEQ ID NO: 71642 - protein, 300 aa, Homo sapiens [sequence omitted]

SEQ ID NO: 71643 - protein, 312 aa, Homo sapiens [sequence omitted]

SEQ ID NO: 71644 - protein, 48 aa, Homo sapiens
MIGALFEMFLALPGAEEPLFMQAFVLPQAPFSKQSPEDFNDVNEATCL

SEQ ID NO: 71645 - protein, 47 aa, Homo sapiens
MMGLVVLKLFLRLLFKLASCSVLPIGVTRERLGGRRREYASCFFCSC

SEQ ID NO: 71646 - protein, 60 aa, Homo sapiens [sequence omitted]

SEQ ID NO: 71647 - protein, 31 aa, Homo sapiens
MFAYFLTGSGVILAHCNLRLPGSSDSPASAS

SEQ ID NO: 71648 - protein, 428 aa, Homo sapiens
MPLALLVLLLLGPGGWCLAEPPRDSLREELVITPLPSGDVAATFQFRTRWDSELQREGVSHYRLFPKALGQLISKYSLRELHLSFTQGFWRTRYWGPPFLQAPSGAELWVWFQDTVTDVDKSWKELSNVLSGIFCASLNFIDSTNTVTPTASFKPLGLANDTDHYFLRYAVLPREVVCTENLTPWKKLLPCSSKAGLSVLLKADRLFHTSYHSQAVHIRPVCRNARCTSISWELRQTLSVVFDAFITGQGKKDWSLFRMFSRTLTEPCPLASESRVYVDITTYNQDNETLEVHPPPTTTYQDVILGTRKTYAIYDLLDTAMINNSRNLNIQLKWKRPPENGYIHYQPAQDRLQPHLLEMLIQLPANSVTKVSIQFERALLKWTEYTPDPNHGFYVSPSVLSALVPSMVAAKPVDWEESPLFNSLLPWT

SEQ ID NO: 71649 - protein, 73 aa, Homo sapiens
MGNADYVAAFLHLLLPLAFEDLTQPSGTLRGKCRPRQSASPTSHSCCRCWPAAGSVPCWRAATTWSHWRSQCA

SEQ ID NO: 71650 - protein, 261 aa, Homo sapiens
MRGCLRLALLCALPWLLLAASPGHPAKSPRQPPAPRRDPFDAARGADFDHVYSGVVNLSTENIYSFNYTSQPDQVTAVRVYVNSSSENLNYPVLVVVRQQKEVLSWQVPLLFQGLYQRSYNYQEVSRTLCPSEATNETGPLQQLIFVDVASMAPLGAQYKLLVTKLKHFQLRTNVAFHFTASPSQPQYFLYKFPKDVDSVIIKVVSEMAYPCSVVSVQNIMCPVYDLDHNVEFNGVYQSMTKKAAITLQVRHCFCGHYCQW

SEQ ID NO: 71651 - protein, 79 aa, Homo sapiens
MRKDWFMVGIVLAIAGAKLEPSIGVNGGPLKPEITVSYIAVATIFFNSGLSLKTEFADSRLHASACVFCSDFNQGSWWK

SEQ ID NO: 71652 - protein, 58 aa, Homo sapiens
MRKDWFMVGIVLAIAGAKLEPSIGVNGGPLKPEITVSYIAVATIFFNSGLSLKTELLT

SEQ ID NO: 71653 - protein, 440 aa, Homo sapiens
MSPATTGTFLLTAFLLSCADGINGTVNWKTRQANNFIISRKMAAGMKDVYSIFSKVHSDRNVYPSAGVLFVHVLEREYFKGEFPPYPKPGEISNDPITFNTNLMGYPDRPGWLRYIQRTPYSDGVLYGSPTAENVGKPTIIEITAYNRRTFETARHNLIINIMSAEDFPLPYQAEFFIKNMNVEEMLASEVLGDFLGAVKNVWQPERLNAINITSALDRGGRVPLPINDLKEGVYVMVGADVPFSSCLREVENPQNQLRCSQEMEPVITCDKKFRTQFYIDWCKISLVDKTKQVSTYQEVIRGEGILPDGGEYKPPSDSLKSRDYYTDFLITLAVPSAVALVLFLILAYIMCCRREGVIQLVHHSAIQKSTKELRDMSKNREIAWPLSTLPVFHPVTGEIIPPLHTDNYDSTNMPLMQTQQNLPHQTQIPQQQTTGKWYP

SEQ ID NO: 71654 - protein, 588 aa, Homo sapiens
LGLLFLGALRAFPQDRPFEDTCHGNPSHYYDKAVRRCCYRCPMGLFPTQQCPQRPTDCRKQCEPDYYLDEADRCTACVTCSRDDLVEKTPCAWNSSRVCECRPGMFCSTSAVNSCARCFFHSVCPAGMIVKFPGTAQKNTVCEPASPGVSPACASPENCKEPSSGTIPQAKPTPVSPATSSASTMPVRGGTRLAQEAASKLTRAPDSPSSVGRPSSDPGLSPTQPCPEGSGDCRKQCEPDYYLDEAGRCTACVSCSRDDLVEKTPCAWNSSRTCECRPGMICATSATNSCARCVPYPICAAETVTKPQDMAEKDTTFEAPPLGTQPDCNPTPENGEAPASTSPTQSLLVDSQASKTLPIPTSAPVALSSTGKPVLDAGPVLFWVILVLVVVVGSSAFLLCHRRACRKRIRQKLHLCYPVQTSQPKLELVDSRPRRSSTQLRSGASVTEPVAEERGLMSQPLMETCHSVGAAYLESLPLQDASPAGGPSSPRDLPEPRVSTEHTNNKIEKIYIMKADTVIVGTVKAELPEGRGLAGPAEPELEEELEADHTPHYPEQETEPPLGSCSDVMLSVEEEGKEDPLPTAASGK

SEQ ID NO: 71655 - protein, 10 aa, Homo sapiens
IFLLFTWQVF

SEQ ID NO: 71656 - protein, 32 aa, Homo sapiens
IFSHPYLLWVSAWAGPWSCWAEASAAWPPVTT

SEQ ID NO: 71657 - protein, 70 aa, Homo sapiens
VVIALLCMSGYLIWRNWKRKNTKSMNFDNPVYRKTTEEEDEDELHIGRTAQIGHVYPARVALSLEDDGLP

SEQ ID NO: 71658 - protein, 364 aa, Homo sapiens
LGQVVTLILLLLLKVYQGKGCQGSADHVVSISGVPLQLQPNSIQTKVDSIAWKKLLPSQNGFHHILKWENGSLPSNTSNDRFSFIVKNLSLLIKAAQQQDSGLYCLEVTSISGKVQTATFQVFVFDKVEKPRLQGQGKILDRGRCQVALSCLVSRDGNVSYAWYRGSKLIQTAGNLTYLDEEVDINGTHTYTCNVSNPVSWESHTLNLTQDCQNAHQEFRFWPFLVIIVILSALFLGTLACFCVWRRKRKEKQSETSPKEFLTIYEDVKDLKTRRNHEQEQTFPGGGSTIYSMIQSQSSAPTSQEPAYTLYSLIQPSRKSGSRKRNHSPSFNSTIYEVIGKSQPKAQNPARLSRKELENFDVYS

SEQ ID NO: 71659 - protein, 9 aa, Homo sapiens
LLAAVFAVF

SEQ ID NO: 71660 - protein, 14 aa, Homo sapiens
IFGKNFTRLILMTM

SEQ ID NO: 71661 - protein, 55 aa, Homo sapiens
LLVLLLLLLPTLRRPGPRCRPGPGCRLRPRRPRPRVRPSQDAAPGRVSTSWPHLP

SEQ ID NO: 71662 - protein, 108 aa, Homo sapiens
MMVLALVFVRKLMDLLFTKRELSWLDDLMPESKKKKLEDAEKEEEQSMLAMEDEGTVQLPLEGHYRDDPSVINISDEMSKTALWRNLLITADNSKDKESSFPSKSSPS

SEQ ID NO: 71663 - protein, 282 aa, Homo sapiens
ILKFHAIYWPAFLLGAGMSPPQRICVHSHWTVCGQKMSKSLGNVVDPRTCLNRYTVDGFRYFLLRQGVPNWDCDYYDEKVVKLLNSELADALGGLLNRCTAKRINPSETYPAFCTTCFPSEPGLVGPSVRAQAEDYALVSAVATLPKQVADHYDNFRIYKALEAVSSCVRQTNGFVQRHAPWKLNWESPVDAPWLGTVLHVALECLRVFGTLLQPVTPSLADKLLSRLGVSASERSLGELYFLPRFYGHPCPFEGRRLGPETGLLFPRLDQSRTWLVKAHRT

SEQ ID NO: 71664 - protein, 10 aa, Homo sapiens
VCVFLLFLFV

SEQ ID NO: 71665 - protein, 20 aa, Homo sapiens
ILHMSFPFIYICLVLQWLLG

SEQ ID NO: 71666 - protein, 1721 aa, Homo sapiens
RTGWATPRRPAGLLMLLFWFFDLAEPSGRAANDPFTIVHGNTGKCIKPVYGWIVADDCDETEDKLWKWVSQHRLFHLHSQKCLGLDITKSVNELRMFSCDSSAMLWWKCEHHSLYGAARYRLALKDGHGTAISNASDVWKKGGSEESLCDQPYHEIYTRDGNSYGRPCEFPFLIDGTWHHDCILDEDHSGPWCATTLNYEYDRKWGICLKPENGCEDNWEKNEQFGSCYQFNTQTALSWKEAYVSCQNQGADLLSINSAAELTYLKEKEGIAKIFWIGLNQLYSARGWEWSDHKPLNFLNWDPDRPSAPTIGGSSCARMDAESGLWQSFSCEAQLPYVCRKPLNNTVELTDVWTYSDTRCDAGWLPNNGFCYLLVNESNSWDKAHAKCKAFSSDLISIHSLADVEVVVTKLHNEDIKEEVWIGLKNINIPTLFQWSDGTEVTLTYWDENEPNVPYNKTPNCVSYLGELGQWKVQSCEEKLKYVCKRKGEKLNDASSDKMCPPDEGWKRHGETCYKIYEDEVPFGTNCNLTITSRFEQEYLNDLMKKYDKSLRKYFWTGLRDVDSCGEYNWATVGGRRRAVTFSNWNFLEPASPGGCVAMSTGKSVGKWEVKDCRSFKALSICKKMSGPLGPEEASPKPDDPCPEGWQSFPASLSCYKVFHAERIVRKRNWEEAERFCQALGAHLSSFSHVDEIKEFLHFLTDQFSGQHWLWIGLNKRSPDLQGSWQWSDRTPVSTIIMPNEFQQDYDIRDCAAVKVFHRPWRRGWHFYDDREFIYLRPFACDTKLEWVCQIPKGRTPKTPDWYNPDRAGIHGPPLIIEGSEYWFVADLHLNYEEAVLYCASNHSFLATITSFVGLKAIKNKIANISGDGQKWWIRISEWPIDDHFTYSRYPWHRFPVTFGEECLYMSAKTWLIDLGKPTDCSTKLPFICEKYNVSSLEKYSPDSAAKVQCSEQWIPFQNKCFLKIKPVSLTFSQASDTCHSYGGTLPSVLSQIEQDFITSLLPDMEATLWIGLRWTAYEKINKWTDNRELTYSNFHPLLVSGRLRIPENFFEEESRYHCALILNLQKSPFTGTWNFTSCSERHFVSLCQKYSEVKSRQTLQNASETVKYLNNLYKIIPKTLTWHSAKRECLKSNMQLVSITDPYQQAFLSVQALLHNSSLWIGLFSQDDELNFGWSDGKRLHFSRWAETNGQLEDCVVLDTDGFWKTVDCNDNQPGAICYYSGNETEKEVKPVDSVKCPSPVLNTPWIPFQNCCYNFIITKNRHMATTQDEVHTKCQKLNPKSHILSIRDEKENNFVLEQLLYFNYMASWVMLGITYRNKSLMWFDKTPLSYTHWRAGRPTIKNEKFLAGLSTDGFWDIQTFKVIEEAVYFHQHSILACKIEMVDYKEEYNTTLPQFMPYEDGIYSVIQKKVTWYEALNMCSQSGGHLASVHNQNGQLFLEDIVKRDGFPLWVGLSSHDGSESSFEWSDGSTFDYIPWKGQTSPGNCVLLDPKGTWKHEKCNSVKDGAICYKPTKSKKLSRLTYSSRCPAAKENGSRWIQYKGHCYKSDQALHSFSEAKKLCSKHDHSATIVSIKDEDENKFVSRLMRENNNITMRVWLGLSQHSVDQSWSWLDGSEVTFVKWENKSKSGVGRCSMLIASNETWKKVECEHGFGRVVCKVPLGPDYTAIAIIVATLSILVLMGGLIWFLFQRHRLHLAGFSSVRYAQGVNEDEIMLPSFHD

SEQ ID NO: 71667 - protein, 27 aa, Homo sapiens
IVSLVILLVLISILLYWKRHRNQDREP

SEQ ID NO: 71668 - protein, 48 aa, Homo sapiens
LREPAALEMELLPLWLCLGFHFLTVGWRNRSGTATAASQGVCKLVSFP

SEQ ID NO: 71669 - protein, 14 aa, Homo sapiens
KHILLMLINLIGFS

SEQ ID NO: 71670 - protein, 100 aa, Homo sapiens
LVLFALAFLTCVVFLVVYKVYKYDRACPDGFVLKNTQCIPEGLESYYAEQDSSAREKFYTVINHYNLAKQSITRSVSPWMSVLSEEKLSEQETEAAEKSA

SEQ ID NO: 71671 - protein, 12 aa, Homo sapiens
MPGFLLALLQLN

SEQ ID NO: 71672 - protein, 347 aa, Homo sapiens
IFCGCWLFASLTVMEAAHFFEGTEKLLEVWFSRQQPDANQGSGDLRTIPRSEWDILLKDVQCSIISVTKTDKQEAYVLSESSMFVSKRRFILKTCGTTLLLKALVPLLKLARDYSGFDSIQSFFYSRKNFMKPSHQGYPHRNFQEEIEFLNAIFPNGAAYCMGRMNSDCWYLYTLDFPESRVISQPDQTLEILMSELDPAVMDQFYMKDGVTAKDVTRESGIRDLIPGSVIDATMFNPCGYSMNGMKSDGTYWTIHITPEPEFSYVSFETNLSQTSYDDLIRKVVEVFKPGKFVTTLFVNQSSKCRTVLASPQKIEGFKRLDCQSAMFNDYNFVFTSFAKKQQQQQS

SEQ ID NO: 71673 - protein, 14 aa, Homo sapiens
IFKLVFLFTLFFVL

SEQ ID NO: 71674 - protein, 45 aa, Homo sapiens
KPDLPASWHLSLLLAPLCLASACILSVLRPLGVPCWPGSCVLRTR

SEQ ID NO: 71675 - protein, 17 aa, Homo sapiens
IPAGLALWLVGYITKIS

SEQ ID NO: 71676 - protein, 16 aa, Homo sapiens
ISSSLMMISIFMSTIW

SEQ ID NO: 71677 - protein, 54 aa, Homo sapiens
LLAVFGGYYIRLLVTSQLPQAMGTRHTNSPRIPCPCQLIEAYILGTGCCPFLAR

SEQ ID NO: 71678 - protein, 98 aa, Homo sapiens
RQSGSFLSTGWFTMILALELCEEIVVYGMVSDSYCREKSHPSVPYHYFEKGRLDECQMYLAHEQAPRSAHRFITEKAVFSRWAKKRPIVFAHPSWRTE

SEQ ID NO: 71679 - protein, 14 aa, Homo sapiens
MDSIWILLILLRSP

SEQ ID NO: 71680 - protein, 495 aa, Homo sapiens
VKWFLEFRCIFSLAMSSHFTQDLLPEQGIQDAFPKRILRGYGNCGLDNLYLRKDWESLDECKLQKDYNGLNQCSSTTHSKIFQYNKYVKIFDNFSNLHRRNISNTGEKPFKCQECGKSFQMLSFLTEHQKIHTGKKFQKCGECGKTFIQCSHFTEPENIDTGEKPYKCQECNNVIKTCSVLTKNRIYAGGEHYRCEEFGKVFNQCSHLTEHEHGTEEKPCKYEECSSVFISCSSLSNQQMILAGEKLSKCETWYKGFNHSPNPSKHQRNEIGGKPFKCEECDSIFKWFSDLTKHKRIHTGEKPYKCDECGKAYTQSSHLSEHRRIHTGEKPYQCEECGKVFRTCSSLSNHKRTHSEEKPYTCEECGNIFKQLSDLTKHKKTHTGEKPYKCDECGKNFTQSSNLIVHKRIHTGEKPYKCEECGRVFMWFSDITKHKKTHTGEKPYKCDECGKNFTQSSNLIVHKRIHTGEKPYKCEKCGKAFTQFSHLTVHESIHT

SEQ ID NO: 71681 - protein, 24 aa, Homo sapiens
LAIGMFFTAWFFVYPFTEQPEDQH

SEQ ID NO: 71682 - protein, 763 aa, Homo sapiens
LELAGLFLLVPWVMGLAGTGGPDGQGTGGPSWAVHLESLEGDGEEETLEQQADALAQAAGLVNAGRIGELQGHYLFVQPAGHRPALEVEAIRQQVEAVLAGHEAVRWHSEQRLLRRAKRSVHFNDPKYPQQWHLNNRRSPGRDINVTGVWERNVTGRGVTVVVVDDGVEHTIQDIAPNYSPEGSYDLNSNDPDPMPHPDVENGNHHGTRCAGEIAAVPNNSFCAVGVAYGSRIAGIRVLDGPLTDSMEAVAFNKHYQINDIYSCSWGPDDDGKTVDGPHQLGKAALQHGVIAGRQGFGSIFVVASGNGGQHNDNCNYDGYANSIYTVTIGAVDEEGRMPFYAEECASMLAVTFSGGDKMLRSIVTTDWDLQKGTGCTEGHTGTSAAAPLAAGMIALMLQVRPCLTWRDVQHIIVFTATRYEDRRAEWVTNEAGFSHSHQHGFGLLNAWRLVNAAKIWTSVPYLASYVSPVLKENKAIPQSPRSLEVLWNVSRMDLEMSGLKTLEHVAVTVSITHPRRGSLELKLFCPSGMMSLIGAPRSMDSDPNGFNDWTFSTVRCWGERARGTYRLVIRDVGDESFQVGILRQWQLTLYGSVWSAVDIRDRQRLLESAMSGKYLHDDFALPCPPGLKIPEEDGYTITPNTLKTLVLVGCFTVFWTVYYMLEVYLSQRNVASNQVCRSGPCHWPHRSRKAKEEGTELESVPLCSSKDPDEVETESRGPPTTSDLLAPDLLEQGDWSLSQNKSALDCPHQHLDVPHGKEEQIC

SEQ ID NO: 71683 - protein, 42 aa, Homo sapiens
LALTASLLAQVLVWHTRTEKPKMKQEEQLQRQGRGSDPAIEV

SEQ ID NO: 71684 - protein, 6 aa, Homo sapiens
LFGILL

SEQ ID NO: 71685 - protein, 9 aa, Homo sapiens
MYIFCFGLV

SEQ ID NO: 71686 - protein, 820 aa, Homo sapiens
LIRTMESRVLLRTFCLIFGLGAVWGLGVDPSLQIDVLTELELGESTTGVRQVPGLHNGTKAFLFQDTPRSIKASTATAEQFFQKLRNKHEFTILVTLKQTHLNSGVILSIHHLDHRYLELESSGHRNEVRLHYRSGSHRPHTEVFPYILADDKWHKLSLAISASHLILHIDCNKIYERVVEKPSTDLPLGTTFWLGQRNNAHGYFKGIMQDVQLLVMPQGFIAQCPDLNRTCPTCNDFHGLVQKIMELQDILAKTSAKLSRAEQRMNRLDQCYCERTCTMKGTTYREFESWIDGCKNCTCLNGTIQCETLICPNPDCPLKSALAYVDGKCCKECKSICQFQGRTYFEGERNTVYSSSGVCVLYECKDQTMKLVESSGCPALDCPESHQITLSHSCCKVCKGYDFCSERHNCMENSICRNLNDRAVCSCRDGFRALREDNAYCEDIDECAEGRHYCRENTMCVNTPGSFMCICKTGYIRIDDYSCTEHDECITNQHNCDENALCFNTVGGHNCVCKPGYTGNGTTCKAFCKDGCRNGGACIAANVCACPQGFTGPSCETDIDECSDGFVQCDSRANCINLPGWYHCECRDGYHDNGMFSPSGESCEDIDECGTGRHSCANDTICFNLDGGYDCRCPHGKNCTGDCIHDGKVKHNGQIWVLENDRCSVCSCQNGFVMCRRMVCDCENPTVDLFCCPECDPRLSSQCLHQNGETLYNSGDTWVQNCQQCRCLQGEVDCWPLPCPDVECEFSILPENECCPRCVTDPCQADTIRNDITKTCLDEMNVVRFTGSSWIKHGTECTLCQCKNGHICCSVDPQCLQEL

SEQ ID NO: 71687 - protein, 46 aa, Homo sapiens
ISTAHTLDRAVRSDWLLLVLIYACLEELIPELIFNLYCQGNATLFF

SEQ ID NO: 71688 - protein, 17 aa, Homo sapiens
IFFIFVFLFLIFHLLNF

SEQ ID NO: 71689 - protein, 34 aa, Homo sapiens
LAFIVLFLLWPFAWLQVAGLSEEQLQEPITGWRK

SEQ ID NO: 71690 - protein, 1209 aa, Homo sapiens
VVTAAVVLLLSGVGPAHGSEDIVVGCGGFVKSDVEINYSLIEIKLYTKHGTLKYQTDCAPNNGYFMIPLYDKGDFILKIEPPLGWSFEPTTVELHVDGVSDICTKGGDINFVFTGFSVNGKVLSKGQPLGPAGVQVSLRNTGTEAKIQSTVTQPGGKFAFFKVLPGDYEILATHPTWALKEASTTVRVTNSNANAASPLIVAGYNVSGSVRSDGEPMKGVKFLLFSSLVTKEDVLGCNVSPVPGFQPQDESLVYLCYTVSREDGSFSFYSLPSGGYTVIPFYRGERITFDVAPSRLDFTVEHDSLKIEPVFHVMGFSVTGRVLNGPEGDGVPEAVVTLNNQIKVKTKADGSFRLENITTGTYTIHAQKEHLYFETVTIKIAPNTPQLADIVATGFSVCGRISIIRFPDTVKQMNKYKVVLSSQDKDKSLVTVETDAHGSFCFKAKPGTYKVQVMVPEAETRAGLTLKPQTFPLTVTDRPVMDVAFVQFLASVSGKVSCLDTCGDLLVTLQSLSRQGEKRSLQLSGKVNAMTFTFDNVLPGKYKISIMHEDWCWKNKSLEVEVLEDDVSAVEFRQTGYMLRCSLSHAITLEFYQDGNGRENVGIYNLSKGVNRFCLSKPGVYKVTPRSCHRFEQAFYTYDTSSPSILTLTAIRHHVLGTITTDKMMDVTVTIKSSIDSEPALVLGPLKSVQELRREQQLAEIEARRQEREKNGNEEGEERMTKPPVQEMVDELQGPFSYDFSYWARSGEKITVTPSSKELLFYPPSMEAVVSGESCPGKLIEIHGKAGLFLEGQIHPELEGVEIVISEKGASSPLITVFTDDKGAYSVGPLHSDLEYTVTSQKEGYVLTAVEGTIGDFKAYALAGVSFEIKAEDDQPLPGVLLSLSGGLFRSNLLTQDNGILTFSNLSPGQYYFKPMMKEFRFEPSSQMIEVQEGQNLKITITGYRTAYSCYGTVSSLNGEPEQGVAMEAVGQNDCSIYGEDTVTDEEGKFRLRGLLPGCVYHVQLKAEGNDHIERALPHHRVIEVGNNDIDDVNIIVFRQINQFDLSGNVITSSEYLPTLWVKLYKSENLDNPIQTVSLGQSLFFHFPPLLRDGENYVVLLDSTLPRSQYDYILPQVSFTAVGYHKHITLIFNPTRKLPEQDIAQGSYIALPLTLLVLLAGYNHDKLIPLLLQLTSRLQGVGALGQAASDNSGPEDAKRQAKKQKTRRT

SEQ ID NO: 71691 - protein, 1209 aa, Homo sapiens; identical to SEQ ID NO: 71690

SEQ ID NO: 71692 - protein, 10 aa, Homo sapiens
LLYFVNIFFF

SEQ ID NO: 71693 - protein, 8 aa, Homo sapiens
ILFLVGLT

SEQ ID NO: 71694 - protein, 47 aa, Homo sapiens
VWGPSRSSAASWACILGCCCSCLPHRSPWESSSPLSGPSWSEACGTS

SEQ ID NO: 71695 - protein, 13 aa, Homo sapiens
LTFSLAFLLCGCL

SEQ ID NO: 71696 - protein, 21 aa, Homo sapiens
LEALCPLLVSLCLLLASLAEH

SEQ ID NO: 71697 - protein, 20 aa, Homo sapiens
KVILPLFLCPLGMVETSLML

SEQ ID NO: 71698 - protein, 226 aa, Homo sapiens
KKKAALLSAAILCFLRTALRQSFSSALVALVPSGAQPLPATKDTVLAPLRMSQVRSLVIGLQNLLVQKDPLLSQACVGCLEALLDYLDARSPDIALHVASQPWNRFLLFTLLDAGENSFLRPEILRLMTLFMRYRSSSVLSHEEVGDVLQGVALADLSTLSNTTLQALHGFFQQLQSMGHLADHSMAQTLQASLEGLPPSTSSGQPPLQDMLCLGGVAVSLSHIRN

SEQ ID NO: 71699 - protein, 98 aa, Homo sapiens
LNPSVLSRLLWMFTGAGSCLETLEKGKPLVVVINEKLMNNHQLELAKQLHKEGHLFYCTCSTLPGLLQSMDLSTLKCYPPGQPEKFSAFLDKVVGLQK

SEQ ID NO: 71700 - protein, 86 aa, Homo sapiens
MISQPRHILNWAVFVWGLSGPCRMLSSCPGLSPHSMPVALPKTCLSRYCQMSSRGEKSSSVENRFYLNSEPGYDSIANYGGDLVHV

SEQ ID NO: 71701 - protein, 28 aa, Homo sapiens
IECYSTLDLSLIFWSLASCIFLEPQLNS

SEQ ID NO: 71702 - protein, 26 aa, Homo sapiens
KKKLWVFFFFFLSGGMGTPKLIWQQR

SEQ ID NO: 71703 - protein, 107 aa, Homo sapiens
KPEWTCLLKLLLFHFSGVTESSAPRLNSVPFGRMEADASVDMFSKVLEHQLLQTTKLVEEHLDSEIQKLDQMDEDELERLKEKRLQALRKAQQQKQVTSLPCFLKLL

SEQ ID NO: 71704 - protein, 21 aa, Homo sapiens
ILYIYLSMYLRHSQPKAWDSL

SEQ ID NO: 71705 - protein, 1368 aa, Homo sapiens
LLLLLPLLLLPPAAPGTRDPPPSPARRALSLAPLAGAGLELQLERRPEREPPPTPPRERRGPATPGPSYRAPEPGAATQRGPSGRAPRGGSADAAWKHWPESNTEAHVENITFYQNQEDFSTVSSKEGVMVQTSGKSHAASDAPENLTLLAETADARGRSGSSSRTNFTILPVGYSLEIATALTSQSGNLASESLHLPSSSSEFDERIAAFQTKSGTASEMGTERAMGLSEEWTVHSQEATTSAWSPSFLPALEMGELTTPSRKRNSSGPDLSWLHFYRTAASSPLLDLSSSSESTEKLNNSTGLQSSSVSQTKTMHVATVFTDGGPRTLRSLTVSLGPVSKTEGFPKDSRIATTSSSVLLSPSAVESRRNSRVTGNPGDEEFIEPSTENEFGLTSLRWQNDSPTFGEHQLASSSEVQNGSPMSQTETVSRSVAPMRGGEITAHWLLTNSTTSADVTGSSASYPEGVNASVLTQFSDSTVQSGGSHTALGDRSYSESSSTSSSESLNSSAPRGERSIAGISYGQVRGTAIEQRTSSDHTDHTYLSSTFTKGERALLSITDNSSSSDIVESSTSYIKISNSSHSEYSSFFHAQTERSNISSYDGEYAQPSTESPVLHTSNLPSYTPTINMPNTSVVLDTDAEFVSDSSSSSSSSSSSSSSGPPLPLPSVSQSHHLFSSILPSTRASVHLLKSTSDASTPWSSSPSPLPVSLTTSTSAPLSVSQTTLPQSSSTPVLPRARETPVTSFQTSTMTSFMTMLHSSQTADLKSQSTPHQEKVITESKSPSLVSLPTESTKAVTTNSPLPPSLTESSTEQTLPATSTNLAQMSPTFTTTILKTSQPLMTTPGTLSSTASLVTGPIAVQTTAGKQLSLTHPEILVPQISTEGGISTERNRVIVDATTGLIPLTSVPTSAKEMTTKLGVTAEYSPASRSLGTSPSPQTTVVSTAEDLAPKSATFAVQSSTQSPTTVSSSASVNSCAVNPCLHNGECVADNTSRGYHCRCPPSWQGDDCSVDVNECLSNPCPSTAMCNNTQGSFICKCPVGYQLEKGICNLVRTFVTEFKLKRTFLNTTVEKHSDLQEVENEITKTLNMCFSALPSYIRSTVHASRESNAVVISLQTTFSLASNVTLFDLADRMQKCVNSCKSSAEVCQLLGSQRRIFRAGSLCKRKSPECDKDTSICTDLDGVALCQCKSGYFQFNKMDHSCRACEDGYRLENETCMSCPFGLGGLNCGNPYQLITVVIAAAGGGLLLILGIALIVTCCRKNKNDISKLIFKSGDFQMSPYAEYPKNPRSQEWGREAIEMHENGSTKNLLQMTDVYYSPTSVRNPELERNGLYPAYTGLPGSRHSCIFPGQYNPSFISDESRRRDYF

SEQ ID NO: 71706 - protein, 514 aa, Homo sapiens
KLLLWGAASALSLAGASLVLSLLQRVASYARKWQQMRPIPTVARAYPLVGHALLMKPDGREFFQQIIEYTEEYRHMPLLKLWVGPVPMVALYNAENVEVILTSSKQIDKSSMYKFLEPWLGLGLLTSTGNKWRSRRKMLTPTFHFTILEDFLDIMNEQANILVKKLEKHINQEAFNCFFYITLCALDIICETAMGKNIGAQSNDDSEYVRAVYRMSEMIFRRIKMPWLWLDLWYLMFKEGWEHKKSLQILHTFTNSVIAERANEMNANEDCRGDGRGSAPSKNKRRAFLDLLLSVTDDEGNRLSHEDIREEVDTFMFEGHDTTAAAINWSLYLLGSNPEVQKKVDHELDDVFGKSDRPATVEDLKKLRYLECVIKETLRLFPSVPLFARSVSEDCEVAGYRVLKGTEAVIIPYALHRDPRYFPNPEEFQPERFFPENAQGRHPYAYVPFSAGPRNCIGQKFAVMEEKTILSCILRHFWIESNQKREELGLEGQLILRPSNGIWIKLKRRNADER

SEQ ID NO: 71707 - protein, 135 aa, Homo sapiens
RMALSVLRLALLLLAVTFAGSARSGPGERGPPEKSGFGSQTGGGPCPAPGGLGDGTRAPVTGGSPEDLPASLIPQFGLFSKYRTPNCSQYRLPGCPRHFNPVCGSDMSTYANECTLCMKIREGGHNIKIIRNGPC

SEQ ID NO: 71708 - protein, 108 aa, Homo sapiens
LWLLSAEWKRVLLFVSLAMALQLSREQGITLRGSAEIVAEFFSFGINSILYQRGIYPSETFTRVQKYGLTLLVTTDLELIKYLNNVVEQLKVHPEKSLRKLSRMKSVQ

SEQ ID NO: 71709 - protein, 324 aa, Homo sapiens
VIGPIWLMLLLGTVHCQIVSTRTPKPPLSTGGKRRRKLRKAAHLEVHREGDGSSTTDNTQEGAVQNHGTSTSHSVGTVFRDLWHAAFFLSGSKKAKNSIDKSTETDNGYVSLDGKKTVKSGEDGIQNHEPQCETIRPEETAWNTGTLRNGPSKDTQRTITNVSDEVSSEEGPETGYSLRRHVDRTSEGVLRNRKSHHYKKHYPNEDAPKSGTSCSSRCSSSRQDSESARPESETEDVLWEDLLHCAECHSSCTSETDVENHQINPCVKKEYRDDPFHQSHLPWLHSSHPGLEKISAIVWEGNDCKKADMSVLEISGMIMNRVSF

SEQ ID NO: 71710 - protein, 18 aa, Homo sapiens
ILAPQVWDFWVFSWLASC

SEQ ID NO: 71711 - protein, 43 aa, Homo sapiens
VFHNQDRLYDHKKMRGLLLVLMEWVAVIPGLHQRPQHHPAIST

SEQ ID NO: 71712 - protein, 32 aa, Homo sapiens
IRLFTGEFMTPLTLLLSQTLGNIPAAAFLTNC

SEQ ID NO: 71713 - protein, 11 aa, Homo sapiens
ITLWFCISICW

SEQ ID NO: 71714 - protein, 871 aa, Homo sapiens
TSALWALWLLLALCWAPRESGATGTGRKAKCEPSQFQCTNGRCITLLWKCDGDEDCVDGSDEKNCVKKTCAESDFVCNNGQCVPSRWKCDGDPDCEDGSDESPEQCHMRTCRIHEISCGAHSTQCIPVSWRCDGENDCDSGEDEENCGNITCSPDEFTCSSGRCISRNFVCNGQDDCSDGSDELDCAPPTCGAHEFQCSTSSCIPISWVCDDDADCSDQSDESLEQCGRQPVIHTKCPASEIQCGSGECIHKKWRCDGDPDCKDGSDEVNCPSRTCRPDQFECEDGSCIHGSRQCNGIRDCVDGSDEVNCKNVNQCLGPGKFKCRSGECIDISKVCNQEQDCRDWSDEPLKECHINECLVNNGGCSHICKDLVIGYECDCAAGFELIDRKTCGDIDECQNPGICSQICINLKGGYKCECSRGYQMDLATGVCKAVGKEPSLIFTNRRDIRKIGLERKEYIQLVEQLRNTVALDADIAAQKLFWADLSQKAIFSASIDDKVGRHVKMIDNVYNPAAIAVDWVYKTIYWTDAASKTISVATLDGTKRKFLFNSDLREPASIAVDPLSGFVYWSDWGEPAKIEKAGMNGFDRRPLVTADIQWPNGITLDLIKSRLYWLDSKLHMLSSVDLNGQDRRIVLKSLEFLAHPLALTIFEDRVYWIDGENEAVYGANKFTGSELATLVNNLNDAQDIIVYHELVQPSGKNWCEEDMENGGCEYLCLPAPQINDHSPKYTCSCPSGYNVEENGRDCQSTATTVTYSETKDTNTTEISATSGLVPGGINVTTAVSEVSVPPKGTSAAWAILPLLLLVMAAVGGYLMWRNWQHKNMKSMNFDNPVYLKTTEEDLSIDIGRHSASVGHTYPAISVVSTDDDLA

SEQ ID NO: 71715 - protein, 140 aa, Homo sapiens
ILLMSMAFLTCCLLKCVKKSKRRRSNRSAQLWSQLKDEDLETVQAAYLGLKHFNKPVSGPSQAHDNHSFTTDHGESTSKLASVTRSVDKDPGIPRALSLSGSSSSPQAQVMVHMANPRQPLPASGLATGMPQQPAAYALG

SEQ ID NO: 71716 - protein, 14 aa, Homo sapiens
LMLQFIWILSWIEA

SEQ ID NO: 71717 - protein, 329 aa, Homo sapiens
VLVTVGGYGALFTAFQALVDEGDEVIIIEPFFDCYEPMTMMAGGRPVFVSLKPGPIQNGELGSSSNWQLDPMELAGKFTSRTKALVLNTPNNPLGKVFSREELELVASLCQQHDVVCITDEVYQWMVYDGHQHISIASLPGMWERTLTIGSAGKTFSATGWKVGWVLGPDHIMKHLRTVHQNSVFHCPTQSQAAVAESFEREQLLFRQPSSYFVQFPQAMQRCRDHMIRSLQSVGLKPIIPQGSYFLITDISDFKRKMPDLPGAVDEPYDRRFVKWMIKNKGLVAIPVSIFYSVPHQKHFDHYIRFCFVKDEATLQAMDEKLRKWKVEL

SEQ ID NO: 71718 - protein, 71 aa, Homo sapiens
IYWGCFYFFPWLRMWRRERSSAHPGEQKLEPLRGLMSCLSSGLGPTPQRSGRGFPRRSPTAAAQPASALKI

SEQ ID NO: 71719 - protein, 24 aa, Homo sapiens
IPANVWMLMTALSYPWALMNSWPL

SEQ ID NO: 71720 - protein, 40 aa, Homo sapiens
LIFFSWCVWWLFLSVEGKRRYHPRLSPTPLQNGFSDTPAV

SEQ ID NO: 71721 - protein, 68 aa, Homo sapiens
KCPLEMQVVRLLLLLVRIQVVEMVFSRPKTRKLLQENSVELKKANTCPQRYVQFMMDTVQIARCLFPH

SEQ ID NO: 71722 - protein, 265 aa, Homo sapiens
IAIVPVFCLMGLLGILVCNLLKRKGYHCTAHKEVGPGPGGGGSGINPAYRTEDANEDTIGVLVRLITEKKENAAALEELLKEYHSKQLVQTSHRPVSKLPPAPPNVPHICPHRHHLHTVQGLASLSGPCCSRCSQKKWPEVLLSPEAVAATTPVPSLLPNPTRVPKAGAKAGRQGEITILSVGRFRVARIPEQRTSSMVSEVKTITEAGPSWGDLPDSPQPGLPPEQQALLGSGGSRTKWLKPPAENKAEENRYVVRLSESNLVI

SEQ ID NO: 71723 - protein, 40 aa, Homo sapiens
IMWVTVMMSNAFAVMVDSGVGNLEMIHGFNMPSGFQGVST

SEQ ID NO: 71724 - protein, 105 aa, Homo sapiens
LLIFLLLHLTVFYFFLFSSSINQSADSGGTDNFVLISQLKEEVMSLKRLLQQRDQTILEKDKKLTELKADFQYQESNLRTKMNSMEKAHKETVEQLQVTTIIYVK

SEQ ID NO: 71725 - protein, 16 aa, Homo sapiens
IVWTCIFSCFGTQLIP

SEQ ID NO: 71726 - protein, 135 aa, Homo sapiens
MHTMSSSHLFYLALCLLTFTSSATAGPETLCGAELVDALQFVCGDRGFYFNKPTGYGSSSRRAPQTGIVDECCFRSCDLRRLEMYCAPLKPAKSARSVRAQRHTDMPKTQKYQPPSTNKNTKSQRRKGSTFEERK

SEQ ID NO: 71727 - protein, 89 aa, Homo sapiens
MIIKLTKPQDTKLHMALYVLQALTATSQGLLNCGVYGWTQHKFHQLKQEARRDADTQTPLLCSQKRFYSRGLNSLESTLTFPASTSTIF

SEQ ID NO: 71728 - protein, 484 aa, Homo sapiens
LLALLTCSLAFGLASEDTKKEVKQSQDLEKSGISRKNDIDLKGIVFVIQSQSNSFHAKRAEQLKKSILKQAADLTQELPSVLLLHQLAKQEGAWTILPLLPHFSVTYSRNSSWIFFCEEETRIQIPKLLETLRRYDPSKEWFLGKALHDEEATIIHHYAFSENPTVFKYPDFAAGWALSIPLVNKLTKRLKSESLKSDFTIDLKHEIALYIWDKGGGPPLTPVPEFCTNDVDFYCATTFHSFLPLCRKPVKKKDIFVAVKTCKKFHGDRIPIVKQTWESQASLIEYYSDYTENSIPTVDLGIPNTDRGHCGKTFAILERFLNRSQDKTAWLVIVDDDTLISISRLQHLLSCYDSGEPVFLGERYGYGLGTGGYSYITGGGGMVFSREAVRRLLASKCRCYSNDAPDDMVLGMCFSGLGIPVTHSPLFHQARPVDYPKDYLSHQVPISFHKHWNIDPVKVYFTWLAPSDEDKARQETQKGFREEL

SEQ ID NO: 71729 - protein, 53 aa, Homo sapiens
LKLCSISLASLQLVICLLDSWHLCLLCLYHFTAPYQESKWHKFWVRCPSQTRH

SEQ ID NO: 71730 - protein, 12 aa, Homo sapiens
MYLFLKLVFLHC

SEQ ID NO: 71731 - protein, 11 aa, Homo sapiens
IRSAVSFVLVI

SEQ ID NO: 71732 - protein, 30 aa, Homo sapiens
IYLFIGGLAVVSRLASNCWTQRILLPQPPE

SEQ ID NO: 71733 - protein, 37 aa, Homo sapiens
IIMGIISLTVTCGLLVASHWRREATKYARWIAFTGSK

SEQ ID NO: 71734 - protein, 855 aa, Homo sapiens
VRRYKLAIATALAILLLQGLVVWSFSGLEEDEAGEKGRQRKPRPLDPGEGSKDTDSSAGRRGSTGRRHGRWRGRAESPGVPVAKVVRAVTSRQRASRRVPPAPPPEAPGRQNLSGAAAGEALVGAAGFPPHGDTGSVEGAPQPTDNGFTPKCEIVGKDALSALARASTKQCQQEIANVVCLHQAGSLMPKAVPRHCQLTGKMSPGIQWDESQAQQPMDGPPVRIAYMLVVHGRAIRQLKRLLKAVYHEQHFFYIHVDKRSDYLHREVVELAQGYDNVRVTPWRMVTIWGGASLLRMYLRSMRDLLEVPGWAWDFFINLSATDYPTRTNEELVAFLSKNRDKNFLKSHGRDNSRFIKKQGLDRLFHECDSHMWRLGERQIPAGIVVDGGSDWFVLTRSFVEYVVYTDDPLVAQLRQFYTYTLLPAESFFHTVLENSLACETLVDNNLRVTNWNRKLGCKCQYKHIVDWCGCSPNDFKPQDFLRLQQVSRPTFFARKFESTVNQEVLEILDFHLYGSYPPGTPALKAYWENTYDAADGPSGLSDVMLTAYTAFARLSLHHAATAAPPMGTPLCRFEPRGLPSSVHLYFYDDHFQGYLVTQAVQPSAQGPAETLEMWLMPQGSLKLLGRSDQASRLQSLEVGTDWDPKERLFRNFGGLLGPLDEPVAVQRWARGPNLTATVVWIDPTYVVATSYDITVDTETEVTQYKPPLSRPLRPGPWTVRLLQFWEPLGETRFLVLPLTFNRKLPLRKDDASWLHAGPPHNEYMEQSFQGLSSILNLPQPELAEEAAQRHTQLTGPALEAWTDRELSSFWSVAGLCAIGPSPCPSLEPCRLTSWSSLSPDPKSELGPVKADGRLR

SEQ ID NO: 71735 - protein, 11 aa, Homo sapiens
LCCVWVCVFLF

SEQ ID NO: 71736 - protein, 25 aa, Homo sapiens
VAIRLVLKFLMLCLVTHTVPRDSAL

SEQ ID NO: 71737 - protein, 55 aa, Homo sapiens
RIALLILAITIHNVPGFHLAARNSTVFFKALENSVASPERQNIAPVWQEVELMQH

SEQ ID NO: 71738 - protein, 38 aa, Homo sapiens
LLLSLVIQLALLFHCWDMYIARQIGLPKDQNVTKRALV

SEQ ID NO: 71739 - protein, 16 aa, Homo sapiens
MNWIMSISFLFLRFRT

SEQ ID NO: 71740 - protein, 725 aa, Homo sapiens
VFVGGTLVLGTILFLVSQGLLSLQAKQEYCLKPECIEAAAAILSKVNLSVDPCDNFFRFACDGWISNNPIPEDMPSYGVYPWLRHNVDLKLKELLEKSISRRRDTEAIQKAKILYSSCMNEKAIEKADAKPLLHILRHSPFRWPVLESNIGPEGVWSERKFSLLQTLATFRGQYSNSVFIRLYVSPDDKASNEHILKLDQATLSLAVREDYLDNSTEAKSYRDALYKFMVDTAVLLGANSSRAEHDMKSVLRLEIKIAEIMIPHENRTSEAMYNKMNISELSAMIPQFDWLGYIKKVIDTRLYPHLKDISPSENVVVRVPQYFKDLFRILGSERKKTIANYLVWRMVYSRIPNLSRRFQYRWLEFSRVIQGTTTLLPQWDKCVNFIESALPYVVGKMFVDVYFQEDKKEMMEELVEGVRWAFIDMLEKENEWMDAGTKRKAKEKARAVLAKVGYPEFIMNDTHVNEDLKAIKFSEADYFGNVLQTRKYLAQSDFFWLRKAVPKTEWFTNPTTVNAFYSASTNQIRFPAGELQKPFFWGTEYPRSLSYGAIGVIVGHEFTHGFDNNGRKYDKNGNLDPWWSTESEEKFKEKTKCMINQYSNYYWKKAGLNVKGKRTLGENIADNGGLREAFRAYRKWINDRRQGLEEPLLPGITFTNNQLFFLSYAHVRCNSYRPEAAREQVQIGAHSPPQFRVNGAISNFEEFQKAFNCPPNSTMNRGMDSCRLW

SEQ ID NO: 71741 - protein, 62 aa, Homo sapiens
MGRQMYLSFSFLTVIMRIQTYLQSTKPIIDLYEEMGKVKKIDASKSVDEVFDEVVQIFDKEG

SEQ ID NO: 71742 - protein, 120 aa, Homo sapiens
MPRVLWLFWISSFTHYQSTRKNLREICWDKAGHFFDLPDFLSWKATGVTARSLCSLVCKWTYSAEKGWDDSFWKMIGLEDFVADNYSKIDSQKDCFQLLALPGIALKSQKGKGVTLTTSW

SEQ ID NO: 71743 - protein, 88 aa, Homo sapiens
MSWFSLLKICLSSLGGLMHFSVSADQLLPPPNLNGRMRHSGFSYPKRGFFPLFVSIIHFIGRNSVPVNSNWDQRNRVPLLKMAVTRGY

SEQ ID NO: 71744 - protein, 35 aa, Homo sapiens
MKLIFFTVLILMIPSIKKTDRSIVCCLRKGESGQS

SEQ ID NO: 71745 - protein, 1348 aa, Homo sapiens
MCLLFFFSLPPLLVSNHTGRIKVVFTPSICKVTCTKGSCQNSCEKGNTTTLISENGHAADTLTATNFRVVICHLPCMNGGQCSSRDKCQCPPNFTGKLCQIPVHGASVPKLYQHSQQPGKALGTHVIHSTHTLPLTVTSQQGVKVKFPPNIVNIHVKHPPEASVQIHQVSRIDGPTGQKTKEAQPGQSQVSYQGLPVQKTQTIHSTYSHQQVIPHVYPVAAKTQLGRCFQETIGSQCGKALPGLSKQEDCCGTVGTSWGFNKCQKCPKKPSYHGYNQMMECLPGYKRVNNTFCQDINECQLQGVCPNGECLNTMGSYRCTCKIGFGPDPTFSSCVPDPPVISEEKGPCYRLVSSGRQCMHPLSVHLTKQLCCCSVGKAWGPHCEKCPLPGTAAFKEICPGGMGYTVSGVHRRRPIHHHVGKGPVFVKPKNTQPVAKSTHPPPLPAKEEPVEALTFSREHGPGVAEPEVATAPPEKEIPSLDQEKTKLEPGQPQLSPGISTIHLHPQFPVVIEKTSPPVPVEVAPEASTSSASQVIAPTQVTEINECTVNPDICGAGHCINLPVRYTCICYEGYRFSEQQRKCVDIDECTQVQHLCSQGRCENTEGSFLCICPAGFMASEEGTNCIDVDECLRPDVCGEGHCVNTVGAFRCEYCDSGYRMTQRGRCEDIDECLNPSTCPDEQCVNSPGSYQCVPCTEGFRGWNGQCLDVDECLEPNVCANGDCSNLEGSYMCSCHKGYTRTPDHKHCRDIDECQQGNLCVNGQCKNTEGSFRCTCGQGYQLSAAKDQCEDIDECQHRHLCAHGQCRNTEGSFQCVCDQGYRASGLGDHCEDINECLEDKSVCQRGDCINTAGSYDCTCPDGFQLDDNKTCQDINECEHPGLCGPQGECLNTEGSFHCVCQQGFSISADGRTCEDVNECELLSGVCGEAFCENVEGSFLCVCADENQEYSPMTGQCRSRTSTDLDVDVDQPKEEKKECYYNLNDASLCDNVLAPNVTKQECCCTSGVGWGDNCEIFPCPVLGTAEFTEMCPKGKGFVPAGESSSEAGGENYKDADECLLFGQEICKNGFCLNTRPGYECYCKQGTYYDPVKLQCFDMDECQDPSSCIDGQCVNTEGSYNCFCTHPMVLDASEKRCIRPAESNEQIEETDVYQDLCWEHLSDEYVCSRPLVGKQTTYTECCCLYGEAWGMQCALCPLKDSDDYAQLCNIPVTGRRQPYGRDALVDFSEQYTPEADPYFIQDRFLNSFEELQAEECGILNGCENGRCVRVQEGYTCDCFDGYHLDTAKMTCVDVNECDELNNRMSLCKNAKCINTDGSYKCLCLPGYVPSDKPNYCTPLNTALNLEKDSDLE

SEQ ID NO: 71746 - protein, 14 aa, Homo sapiens
MSLYLKQAIGLLML

SEQ ID NO: 71747 - protein, 818 aa, Homo sapiens
MLLLLHCLGVFLSCSGHIQDEHPQYHSPPDVVIPVRITGTTRGMTPPGWLSYILPFGGQKHIIHIKVKKLLFSKHLPVFTYTDQGAILEDQPFVQNNCYYHGYVEGDPESLVSLSTCFGGFQGILQINDFAYEIKPLAFSTTFEHLVYKMDSEEKQFSTMRSGFMQNEITCRMEFEEIDNSTQKQSSYVGWWIHFRIVEIVVVIDNYLYIRYERNDSKLLEDLYVIVNIVDSILDVIGVKVLLFGLEIWTNKNLIVVDDVRKSVHLYCKWKSENITPRMQHDTSHLFTTLGLRGLSGIGAFRGMCTPHRSCAIVTFMNKTLGTFSIAVAHHLGHNLGMNHDEDTCRCSQPRCIMHEGNPPITKFSNCSYGDFWEYTVERTKCLLETVHTKDIFNVKRCGNGVVEEGEECDCGPLKHCAKDPCCLSNCTLTDGSTCAFGLCCKDCKFLPSGKVCRKEVNECDLPEWCNGTSHKCPDDFYVEDGIPCKERGYCYEKSCHDRNEQCRRIFGAGANTASETCYKELNTLGDRVGHCGIKNATYIKCNISDVQCGRIQCENVTEIPNMSDHTTVHWARFNDIMCWSTDYHLGMKGPDIGEVKDGTECGIDHICIHRHCVHITILNSNCSPAFCNKRGICNNKHHCHCNYLWDPPNCLIKGYGGSVDSGPPPKRKKKKKFCYLCILLLIVLFILLCCLYRLCKKSKPIKKQQDVQTPSAKEEEKIQRRPHELPPQSQPWVMPSQSQPPVTPSQSHPQVMPSQSQPPVTPSQSQPRVMPSQSQPPVMPSQSHPQLTPSQSQPPVTPSQRQPQLMPSQSQPPVTPS

SEQ ID NO: 71748 - protein, 36 aa, Homo sapiens
MITLSVLHIPLWAHFMDSLCVLVKCAVLLPRPCKAY

SEQ ID NO: 71749 - protein, 29 aa, Homo sapiens
MSGSVQDLLLGHIALLGLVQVILPPQPPK

SEQ ID NO: 71750 - protein, 77 aa, Homo sapiens
LIAFIFLIIKSYRKYHSKPQAPDPHSDPPAKLSSIPGESLTYASTTFKLSEEKSNHLAENHSADFDPIVYAQIKVTN

SEQ ID NO: 71751 - protein, 294 aa, Homo sapiens
IYRLLNTAFGLVHLTAHSSLVCPLSLGGSLGLRPEPPVSFPYLHYDATLPFHCSAILATALDTVTVPYRLCSSPVSMVHLADMLSFCGKKVVTAGAIIPFPLAPGQSLPDSLMQFGGATPWTPLSACGEPSGTRCFAQSVVLRGIDRACHTSQLTPGTPPPSALHACTTGEEILAQYLQQQQPGVMSSSHLLLTPCRVAPPYPHLFSSCSPPGMVLDGSPKGAAVESIPVFGALCSSSSLHQTLEALARDLTKLDLRRWASFMDAGVEHDDVAELLQELQSLAQCYQGGDSLVD

SEQ ID NO: 71752 - protein, 6 aa, Homo sapiens
LILIWI

SEQ ID NO: 71753 - protein, 33 aa, Homo sapiens
VIYLALPLYHMSGSLLGIVGCMGIGQSPQPHLH

SEQ ID NO: 71754 - protein, 103 aa, Homo sapiens
VLFVWELLPTTLVVYFFRVRNPTKDLTNPGMVPSHGFSPRSYFFDNPRRYDSDDDLAWNIAPQGLQGGFAPDYYDWGQQTNSFLAQAGTLQDSTLDPDKPSLG

SEQ ID NO: 71755 - protein, 451 aa, Homo sapiens
LLLLLFLGAAESVRRAQPPRRYTPDWPSLDSRPLPAWFDEAKFGVFIHWGVFSVPAWGSEWFWWHWQGEGRPQYQRFMRDNYPPGFSYADFGPQFTARFFHPEEWADLFQAAGAKYVVLTTKHHEGFTNWPSPVSWNWNSKDVGPHRDLVGELGTALRKRNIRYGLYHSLLEWFHPLYLLDKKNGFKTQHFVSAKTMPELYDLVNSYKPDLIWSDGEWECPDTYWNSTNFLSWLYNDSPVKDEVVVNDRWGQNCSCHHGGYYNCEDKFKPQSLPDHKWEMCTSIDKFSWGYRRDMALSDVTEESEIISELVQTVSLGGNYLLNIGPTKDGLIVPIFQERLLAVGKWLSINGEAIYASKPWRVQWEKNTTSVWYTSKGSAVYAIFLHWPENGVLNLESPITTSTTKITMLGIQGDLKWSTDPDKGLFISLPQLPPSAVPAEFAWTIKLTGVK

SEQ ID NO: 71756 - protein, 47 aa, Homo sapiens
MLQDLLSALWFCHPCCLCCGLCWLGVDAGCSQGGSGCPQGKISNNGI

SEQ ID NO: 71757 - protein, 13 aa, Homo sapiens
LLPLFVQLFVFVK

SEQ ID NO: 71758 - protein, 374 aa, Homo sapiens
LAWPLCPVEMLGQVVTLILLLLLKVYQGKGCQGSADHVVSISGVPLQLQPNSIQTKVDSIAWKKLLPSQNGFHHILKWENGSLPSNTSNDRFSFIVKNLSLLIKAAQQQDSGLYCLEVTSISGKVQTATFQVFVFDKVEKPRLQGQGKILDRGRCQVALSCLVSRDGNVSYAWYRGSKLIQTAGNLTYLDEEVDINGTHTYTCNVSNPVSWESHTLNLTQDCQNAHQEFRFWPFLVIIVILSALFLGTLACFCVWRRKRKEKQSETSPKEFLTIYEDVKDLKTRRNHEQEQTFPGGGSTIYSMIQSQSSAPTSQEPAYTLYSLIQPSRKSGSRKRNHSPSFNSTIYEVIGKSQPKAQNPARLSRKELENFDVYS

SEQ ID NO: 71759 - protein, 834 aa, Homo sapiens
LLLLLLGVLSAGLRPGALATEHYSPLSLLKQELQHRQQQEAPAGGGGCSPQSGDWGDQYSAECGESSFLNFHDSDCEPKGSSPCDSLLSLNTEKILSQAKSIAEQKRFPFATDNDSTNEELAIAYVLIGSGLYDEAIRHFSTMLQEEPDLVSAIYGRGIAYGKKGLHDIKNAELALFELSRVITLEPDRPEVFEQRAEILSPLGRINEAVNDLTKAIQLQPSARLYRHRGTLYFISEDYATAHEDFQQSLELNKNQPIAMLYKGLTFFHRGLLKEAIESFKEALKQKVDFIDAYKSLGQAYRELGNFEAATESFQKALLLNQNHVQTLQLRGMMLYHHGSLQEALKNFKRCLQLEPYNEVCQYMKGLSHVAMGQFYEGIKAQTKVMLNDPLPGQKASPEYLKVKYLREYSRYLHAHLDTPLTEYNIDVDLPGSFKDHWAKNLPFLIEDYEEQPGLQPHIKDVLHQNFESYKPEVQELICVADRLGSLMQYETPGFLPNKRIHRAMGLAALEVMQAVQRTWTNSKVRMNGKTRLMQWRDMFDIAVKWRRIADPDQPVLWLDQMPARSLSRGFNNHINLIRGQVINMRYLEYFEKILHFIKDRILVYHGANNPKGLLEVREALEKVHKVEDLLPIMKQFNTKTKDGFTVNTKVPSLKDQGKEYDGFTITITGDKVGNILFSVETQTTEERTQLYHAEIDALYKDLTAKGKVLILSSEFGEADAVCNLILSLVYYFYNLMPLSRGSSVIAYSVIVGALMASGKEVAGKIPKGKLVDFEAMTAPGSEAFSKVAKSWMNLKSISPSYKTLPSVSETFPTLRSMIEVLNTDSSPRCLKKL

SEQ ID NO: 71760 - protein, 1016 aa, Homo sapiens
LGLLLLLARSGTRALVCLPCDESKCEEPRNCPGSIVQGVCGCCYTCASQRNESCGGTFGIYGTCDRGLRCVIRPPLNGDSLTEYEAGVCEDENWTDDQLLGFKPCNENLIAGCNIINGKCECNTIRTCSNPFEFPSQDMCLSALKRIEEEKPDCSKARCEVQFSPRCPEDSVLIEGYAPPGECCPLPSRCVCNPAGCLRKVCQPGNLNILVSKASGKPGECCDLYECKPVFGVDCRTVECPPVQQTACPPDSYETQVRLTADGCCTLPTRCECLSGLCGFPVCEVGSTPRIVSRGDGTPGKCCDVFECVNDTKPACVFNNVEYYDGDMFRMDNCRFCRCQGGVAICFTAQCGEINCERYYVPEGECCPVCEDPVYPFNNPAGCYANGLILAHGDRWREDDCTFCQCVNGERHCVATVCGQTCTNPVKVPGECCPVCEEPTIITVDPPACGELSNCTLTGKDCINGFKRDHNGCRTCQCINTEELCSERKQGCTLNCPFGFLTDAQNCEICECRPRPKKCRPIICDKYCPLGLLKNKHGCDICRCKKCPELSCSKICPLGFQQDSHGCLICKCREASASAGPPILSGTCLTVDGHHHKNEESWHDGCRECYCLNGREMCALITCPVPACGNPTIHPGQCCPSCADDFVVQKPELSTPSICHAPGGEYFVEGETWNIDSCTQCTCHSGRVLCETEVCPPLLCQNPSRTQDSCCPQCTDQPFRPSLSRNNSVPNYCKNDEGDIFLAAESWKPDVCTSCICIDSVISCFSESCPSVSCERPVLRKGQCCPYCIEDTIPKKVVCHFSGKAYADEERWDLDSCTHCYCLQGQTLCSTVSCPPLPCVEPINVEGSCCPMCPEMYVPEPTNIPIEKTNHRGEVDLEVPLWPTPSENDIVHLPRDMGHLQVDYRDNRLHPSEDSSLDSIASVVVPIIICLSIIIAFLFINQKKQWIPLLCWYRTPTKPSSLNNQLVSVDCKKGTRVQVDSSQRMLRIAEPDARFSGFYSMQKQNHLQADNFYQTV

SEQ ID NO: 71761 - protein, 272 aa, Homo sapiens
MTSIGLLLGVSAAKLGTMDMSITRLLSIRIPALLPPTSTELDVPHNVQVAAVVGIGLVYQGTAHRHTAEVLLAEIGRPPGPEMEYCTDRESYSLAAGLALGMVCLGHGSNLIGMSDLNVPEQLYQYMVGGRRRFQTGMHREKHKSPSYQIKEGDTINVDVTCPGATLALAMIYLKTNNRSIADWLRAPDTMYLLDFVKPEFLLLRTLARCLILWDDILPNSKWVDSNVPQIIRENSISLSEIELPCSEDLNLETLSQAHVYIIAGACLSLGF

SEQ ID NO: 71762 - protein, 59 aa, Homo sapiens
LVIASTVILTVLGAIIWFLYKKHSDSRFTTVFSTAPQSPYNEDCVLVVGEENEYPVQFD

SEQ ID NO: 71763 - protein, 912 aa, Homo sapiens
LAFYVFMVFLATLGLWDVFFGFEENKCSMSYMFEYPEYQKIELPKKLAKRYPAYELYLYGEGSYAEEHKILPLTGIPVLFLPGNAGSYKQVRSIGSIALRKAEDIDFKYHFDFFSVNFNEELVALYGGSLQKQTKFVHECIKTILKLYKGQEFAPKSVAIIGHSMGGLVARALLTLKNFKHDLINLLITQATPHVAPVMPLDRFITDFYTTVNNYWILNARHINLTTLSVAGGFRDYQVRSGLTFLPKLSHHTSALSVVSSAVPKTWVSTDHLSIVWCKQLQLTTVRAFFDLIDADTKQITQNSKKKLSVLYHHFIRHPSKHFEENPAIISDLTGTSMWVLVKVSKWTYVAYNESEKIYFTFPLENHRKIYTHVYCQSTMLDTNSWIFACINSTSMCLQGVDLSWKAELLPTIKYLTLRLQDYPSLSHLVVYVPSVRGSKFVVDCEFFKKEKRYIQLPVTHLFSFGLSSRKVVLNTNGLYYNLELLNFGQIYQAFKINVVSKCSAVKEEITSIYRLHIPWSYEDSLTIAQAPSSTEISLKLHIAQPENNTHVALFKMYTSSDCRYEVTVKTSFSQILGQVVRFHGGALPAYVVSNILLAYRGQLYSLFSTGCCLEYATMLDKEAKPYKVDPFVIIIKFLLGYKWFKELWDVLLLPELDAVILTCQSMCFPLISLILFLFGTCTAYWSGLLSSASVRLLSSLWLALKRPSELPKDIKMISPDLPFLTIVLIIVSWTTCGALAILLSYLYYVFKVVHLQASLTTFKNSQPVNPKHSRRSEKKSNHHKDSSIHHLRLSANDAEDSLRMHSTVINLLTWIVLLSMPSLIYWLKNLRYYFKLNPDPCKPLAFILIPTMAILGNTYTVSIKSSKLLKTTSQFPLPLAVGVIAFGSAHLYRLPCFVFIPLLLHALCNFM

SEQ ID NO: 71764 - protein, 47 aa, Homo sapiens
IRVSLAVLLLMCQEVVMKVSSMNKTLCPNQISSPCLLPPSWPLGLQN

SEQ ID NO: 71765 - protein, 12 aa, Homo sapiens
LKPAWNFFFFFF

SEQ ID NO: 71766 - protein, 16 aa, Homo sapiens
LNAFCLVLYLFNKVFN

SEQ ID NO: 71767 - protein, 25 aa, Homo sapiens
LFLNASQALLLGLLLLINPNICTKN

SEQ ID NO: 71768 - protein, 61 aa, Homo sapiens
LLLLFLVPLLWAPAAVRAGPDEDLSHRNKEPPAPAQQLQPQPVAVQGPEPARVEGHQFFSW

SEQ ID NO: 71769 - protein, 14 aa, Homo sapiens
KCFFLVLAFQTAFG

SEQ ID NO: 71770 - protein, 17 aa, Homo sapiens
MDFLNLLLTFTMQLSIS

SEQ ID NO: 71771 - protein, 1726 aa, Homo sapiens
IFLCVCLIVPLFVTQLSNEATIMSSVSEVNVDIKDFLMSINLEQYLLHFHESGFTTVKDCAAINDSLLQKIGISPTGHRRRILKQLQIILSKMQDIPIYANVHKTKKNDDPSKDYHVPSSDQNICIELSNSGSVQTSSPPQLETVRKNLEDSDASVERSQYPQSDDKLSPPKRDFPTAEEPHLNLGSLNDSLFGSDNIKIESLITKKTVDHTVEEQQTEKVKLITENLSKLPNADSECLSFVGCSTSGTNSGNGTNGLLEGSPPSPFFKFQGEMIVNDLYVPSSPILAPVRSRSKLVSRPSRSFLLRHRPVPEIPGSTKGVSGSYFRERRNVATSTEKSVAWQNSNEENSSSIFPYGETFLFQRLENSKKRSIKNEFLTQGEALKGEAATATNSFIIKSSIYDNRKEKISEDKVEDIWIPREDKNNFLIDTASESEYSTVEECFQSLRRKNSKASKSRTQKALILDSVNRHSYPLSSTSGNADSSAVSSQAISPYACFYGASAKKVKSGWLDKLSPQGKRMFQKRWVKFDGLSISYYNNEKEMYSKGIIPLSAISTVRVQGDNKFEVVTTQRTFVFRVEKEEERNDWISILLNALKSQSLTSQSQAVVTPEKCGYLELRGYKAKIFTVLSGNSVWLCKNEQDFKSGLGITIIPMNVANVKQVDRTVKQSFEIITPYRSFSFTAETEKEKQDWIEAVQQSIAETLSDYEVAEKIWFNESNRSCADCKAPDPDWASINLCVVICKKCAGQHRSLGPKDSKVRSLKMDASIWSNELIELFIVIGNKRANDFWAGNLQKDEELHMDSPVEKRKNFITQKYKEGKFRKTLLASLTKEELNKALCAAVVKPDVLETMALLFSGADVMCATGDPVHSTPYLLAKKAGQSLQMEFLYHNKFSDFPQHDIHSEGVLSQESSQSTFLCDFLYQAPSAASKLSSEKKLLEETNKKWCVLEGGFLSYYENDKSTTPNGTININEVICLAIHKEDFYLNTGPIFIFEIYLPSERVFLFGAETSQAQRKWTEAIAKHFVPLFAENLTEADYDLIGQLFYKDCHALDQWRKGWFAMDKSSLHFCLQMQEVQGDRMHLRRLQELTISTMVQNGEKLDVLLLVEKGRTLYIHGHTKLDFTVWHTAIEKAAGTDGNALQDQQLSKNDVPIIVNSCIAFVTQYGLGCKYIYQKNGDPLHISELLESFKKDARSFKLRAGKHQLEDVTAVLKSFLSDIDDALLTKELYPYWISALDTQDDKERIKKYGAFIRSLPGVNRATLAAIIEHLYRVQKCSEINHMNAHNLALVFSSCLFQTKGQTSEEVNVIEDLINNYVEIFEVKEDQVKQMDIENSFITKWKDTQVSQAGDLLIEVYVERKEPDCSIIIRISPVMEAEELTNDILAIKNIIPTKGDIWATFEVIENEELERPLHYKENVLEQVLRWSSLAEPGSAYLVVKRFLTADTIKHCSDRSTLGSIKEGILKIKEEPSKILSGNKFQDRYFVLRDGFLFLYKDVKSSKHDKMFSLSSMKFYRGVKKKMKPPTSWGLTAYSEKHHWHLCCDSSRTQTEWMTSIFIAQHEYDIWPPAGKERKRSITKNPKIGGLPLIPIQHEGNATLARKNIESARAELERLRLSEKCDKESVDSSLKERASMVAHCLEHKDDKLRNRPRKHRSFNCLEDTEPEAPLGQPKGHKGLKTLRKTEDRNSKATLDSDHKLPSRVIEELNVVLQRSRTLPKELQDEQILK

SEQ ID NO: 71772 - protein, 24 aa, Homo sapiens
LPLGFFIVSSMAMLIRARYISGIP

SEQ ID NO: 71773 - protein, 45 aa, Homo sapiens
VAFLSILITAPIGSLLIGLLGPRLLQKVEHQNKDEEVQGETSVQV

SEQ ID NO: 71774 - protein, 38 aa, Homo sapiens
ITAPIGSLLIGLLGPRLLQKVEHQNKDEEVQGETSVQV

SEQ ID NO: 71775 - protein, 18 aa, Homo sapiens
LWKFLNLTVVSVCTLSSL

SEQ ID NO: 71776 - protein, 61 aa, Homo sapiens
VVSGAVLVYFVVRTVRMRRRNRKTRRYGVLDTNIENMELTPLEQDDEDDDNTLFDANHPRR

SEQ ID NO: 71777 - protein, 21 aa, Homo sapiens
ISLFFVGVLLGSFISGQLSDR

SEQ ID NO: 71778 - protein, 83 aa, Homo sapiens
LVIPVVVLLAIAIFIRWKKSRAFGGKGSGGLNLGNFFASRKGYSRKGFDRLSTEGSDQEKEDDGSESEEEYSAPLPALAPSSS

SEQ ID NO: 71779 - protein, 23 aa, Homo sapiens
IVLLPVLFFSLKNFILSTLLCPN

SEQ ID NO: 71780 - protein, 21 aa, Homo sapiens
ILLFFFFLKATDSQDVDPSKT

SEQ ID NO: 71781 - protein, 15 aa, Homo sapiens
MVSIVLKEFLFFMTA

SEQ ID NO: 71782 - protein, 637 aa, Homo sapiens
IVAAGSWQSQAVHLLGVLVSYCDFIMENQLAKSTEERTFQYQDSLPSLPVPSLEESLKKYLESVKPFANQEEYKKTEEIVQKFQSGIGEKLHQKLLERAKGKRNWLEEWWLNVAYLDVRIPSQLNVNFAGPAAHFEHYWPPKEGTQLERGSITLWHNLNYWQLLRKEKVPVHKVGNTPLDMNQFRMLFSTCKVPGITRDSIMNYFRTESEGRSPNHIVVLCRGRAFVFDVIHEGCLVTPPELLRQLTYIHKKCHSEPDGPGIAALTSEERTRWAKAREYLIGLDPENLALLEKIQSSLLVYSMEDSSPHVTPEDYSEIIAAILIGDPTVRWGDKSYNLISFSNGVFGCNCDHAPFDAMIMVNISYYVDEKIFQNEGRWKGSEKVRDIPLPEELIFIVDEKVLNDINQAKAQYLREASDLQIAAYAFTSFGKKLTKNKMLHPDTFIQLALQLAYYRLHGHPGCCYETAMTRHFYHGRTETMRSCTVEAVRWCQSMQDPSVNLRERQQKMLQAFAKHNKMMKDCSAGKGFDRHLLGLLLIAKEEGLPVPELFTDPLFSKSGGGGNFVLSTSLVGYLRVQGVVVPMVHNGYGFFYHIRDDRFVVACSAWKSCPETDAEKLVQLTFCAFHDMIQLMNSTHL

SEQ ID NO: 71783 - protein, 178 aa, Homo sapiens
KRFFEFCIPRPILVLLLSFPSIMVPLARILPNKNRDELNGFFNKLIRNVIALRDQQAAEERRRDFLQMVLDARHSASPMGVQDFDIVRDVFSSTGCKPNPSRQHQPSPMARPLTVDEIVGQAFIFLIAGYEIITNTLSFATYLLATNPDCQEKLLREVDVFKEKHVSTSWIQLPMGYP

SEQ ID NO: 71784 - protein, 17 aa, Homo sapiens
LGFERLLGPFLGLCSCW

SEQ ID NO: 71785 - protein, 16 aa, Homo sapiens
IARLVNLSRLNMLWLL

SEQ ID NO: 71786 - protein, 13 aa, Homo sapiens
LVNLSRLNMLWLL

SEQ ID NO: 71787 - protein, 15 aa, Homo sapiens
MKTSISWWLCMTTPL

SEQ ID NO: 71788 - protein, 10 aa, Homo sapiens
IYSMLFVVSC

SEQ ID NO: 71789 - protein, 71 aa, Homo sapiens
LSFLALLCSVRAALELCSPGRSPSTSSAAEEPSASAPAPLSSAAPIPGSSLRGVELFPMTVLIRLHYTFVC

SEQ ID NO: 71790 - protein, 41 aa, Homo sapiens
KPSNLWNSLLCFSFFFLAVESCSLNRARLVWNSWAHVVLPP

SEQ ID NO: 71791 - protein, 9 aa, Homo sapiens
LNILALTLM

SEQ ID NO: 71792 - protein, 622 aa, Homo sapiens
ILFCIGMGFICGFSIATGAAARLVSGYDSYGNICGQKNTKLEAIPNSGMDHTQRKYVFFLDPCNLDLINRKIKSVALCVAACPRQELKTLSDVQKFAEINGSALCSYNLKPSEYTTSPKSSVLCPKLPVPASAPIPFFHRCAPVNISCYAKFAEALITFVSDNSVLHRLISGVMTSKEIILGLCLLSLVLSMILMVIIRYISRVLVWILTILVILGSLGGTGVLWWLYAKQRRSPKETVTPEQLQIAEDNLRALLIYAISATVFTVILFLIMLVMRKRVALTIALFHVAGKVFIHLPLLVFQPFWTFFALVLFWVYWIMTLLFLGTTGSPVQNEQGFVEFKISGPLQYMWWYHVVGLIWISEFILACQQMTVAGAVVTYYFTRDKRNLPFTPILASVNRLIRYHLGTVAKGSFIITLVKIPRMILMYIHSQLKGKENACARCVLKSCICCLWCLEKCLNYLNQNAYTATAINSTNFCTSAKDAFVILVENALRVATINTVGDFMLFLGKVLIVCSTGLAGIMLLNYQQDYTVWVLPLIIVCLFAFLVAHCFLSIYEMVVDVLFLCFAIDTKYNDGSPGREFYMDKVLMEFVENSRKAMKEAGKGGVADSRELKPMASGASSA

SEQ ID NO: 71793 - protein, 14 aa, Homo sapiens
LGTLFITMTNLCVL

SEQ ID NO: 71794 - protein, 50 aa, Homo sapiens
IQIYLMVQWKNWPESLEVWVLVLAVPLTHCDLGILCCEDISQVLHVSQQI

SEQ ID NO: 71795 - protein, 22 aa, Homo sapiens
LKKLRQLYKVKILTASLWMMSA

SEQ ID NO: 71796 - protein, 20 aa, Homo sapiens
LSIFSWVEPVTWFLFVLLEK

SEQ ID NO: 71797 - protein, 93 aa, Homo sapiens
KVALYCALCFTVSAVASLVCLLRHGGRTVENMSIIGWFVRSFKYFYGLRFEVRDPRRLQEARPCVIVSNHQSILDMMGRPGLGGGFWGLSGAG

SEQ ID NO: 71798 - protein, 95 aa, Homo sapiens
VGLLSTLLCLKLQRFCPDVSWNNAEDCLSGSRPIQFTSSRKYLTPALDPAALLRAEEGGNPMCLLPELPQPIFPQLGTWKKEPRTRLCFSFGPSW

SEQ ID NO: 71799 - protein, 38 aa, Homo sapiens
ITFCSVMKLSLMVFIPVKVMRRIEPHMQALVTGLQGHG

SEQ ID NO: 71800 - protein, 10 aa, Homo sapiens
MSYVIYFMWL

SEQ ID NO: 71801 - protein, 21 aa, Homo sapiens
MLMYFFIFVFPCEERLSPLSE

SEQ ID NO: 71802 - protein, 50 aa, Homo sapiens
KALDLGTFTGYSALALALALPADGRVVTCEVDAQPPELGRPLWRQVSARA

SEQ ID NO: 71803 - protein, 28 aa, Homo sapiens
VLFILTCTLGYVTLLEETPQDTAYNTKR

SEQ ID NO: 71804 - protein, 12 aa, Homo sapiens
LASLPVYLLVGL

SEQ ID NO: 71805 - protein, 25 aa, Homo sapiens
ILLMILMFSFFLPWLHNNHTINKKE

SEQ ID NO: 71806 - protein, 7 aa, Homo sapiens
ILWIATL

SEQ ID NO: 71807 - protein, 170 aa, Homo sapiens
LEQLTILGAVLLVTFSMAAPGISSQADFAEKLKMIVKILLTDMHLPSFHLKDVLTTIGEKVCLEVSSCLSLCGSSPFTTDKETVLKGQIQAVASPDDPIRRIMESRILTFLETYLASGHQKPLPTVPGGLSPVQRELEEVAIKFARLVNYNKMVFCPYYDAILSKILVRS

SEQ ID NO: 71808 - protein, 104 aa, Homo sapiens
LVLLVILNMMLFYKLWMLEYTTQTLTAWQGLRLQERLPQSQTEWAQLLESQQKYHDTELQKWREIIKSSVMLLDQMKDSLINLQNGIRSRDYTSESEEKRNRYH

SEQ ID NO: 71809 - protein, 15 aa, Homo sapiens
LESLGFCSLFLLLTE

SEQ ID NO: 71810 - protein, 38 aa, Homo sapiens
LFLTLLCLLLLIGLGVLASMCMYCPCFCQEEVSRISNI

SEQ ID NO: 71811 - protein, 14 aa, Homo sapiens
LMKVFCLMHLILYL

SEQ ID NO: 71812 - protein, 15 aa, Homo sapiens
MSLSSVLWAALSFSV

SEQ ID NO: 71813 - protein, 30 aa, Homo sapiens
VGFITIISWNWPSIGPLCFLSLQTLKERTS

SEQ ID NO: 71814 - protein, 136 aa, Homo sapiens
ITPTVKMHTMSSSHLFYLALCLLTFTSSATAGPETLCGAELVDALQFVCGDRGFYFNKPTGYGSSSRRAPQTGIVDECCFRSCDLRRLEMYCAPLKPAKSARSVRAQRHTDMPKTQKEVHLKNASRGSAGNKNYRM

SEQ ID NO: 71815 - protein, 114 aa, Homo sapiens
LPYSFIIGVHGYVLVYSVTSLHSFQVIESLYQKLHEGHGKTRVPVVLVGNKADLSPEREVQAVEGKKLAESWGATFMESSARENQLTQGIFTKVIQEIARVENSYGQERRCHLM

SEQ ID NO: 71816 - protein, 25 aa, Homo sapiens
VASLLIIIFILSKFMPKVMSSQLDS

SEQ ID NO: 71817 - protein, 22 aa, Homo sapiens
LSLRSLIWMVMNVLVMKSFLGC

SEQ ID NO: 71818 - protein, 21 aa, Homo sapiens
IFGILVGNFSLALIIFDWINK

SEQ ID NO: 71819 - protein, 22 aa, Homo sapiens
MYFLKFSLMIVMGAAFAHCIKL

SEQ ID NO: 71820 - protein, 295 aa, Homo sapiens
KNAFVCIYLISCFTQLIDLSTTLSDVAGYTHRIGQLRETLLDMSLKSQDCEILGESEWGLDTPPGWPAAEPADTAFLLERVSISAPSSDKPLIKDLSLKISEGQSLLITGNTGTGKTSLLRVLGGLWTSTRGSVQMLTDFGPHGVLFLPQKPFFTDGTLREQVIYPLKEVYPDSGSADDERILRFLELAGLSNLVARTEGLDQQVDWNWYDVLSPGEMQRLSFARLFYLQPKYAVLDEATSALTEEVESELYRIGQQLGMTFISVGHRQSLEKFHSLVLKLCGGGRWELMRIKVE

SEQ ID NO: 71821 - protein, 53 aa, Homo sapiens
LSEIFLIFSYIFGFVRNLTIKHDGQQRYQQDRSSLHELPCIHWESQHSCGQEI

SEQ ID NO: 71822 - protein, 30 aa, Homo sapiens
INYMLQLVLPVLLLMLALFPMTCKLDRREK

SEQ ID NO: 71823 - protein, 191 aa, Homo sapiens
MAAMFPMLLSGMAGLPNLLGMGGLLTKPTESGTEDKKGSDSKESEGKTERTESQSSENGGENSVSSSPSTSSTAALNTAAAANPLALNPLLLSNILYPGMLLTPGLNLHIPTLSQSNTFDVQNKNSDLGSSKSVEVKEEDSRIKDQEDKGGTEPSPLNENSTDEGSEKADASSGSDSTSSSSEDSDSSNED

SEQ ID NO: 71824 - protein, 41 aa, Homo sapiens
VGLVFVAFALHFYRSLVAHKTDRYKQELEELNRLQGELQAV

SEQ ID NO: 71825 - protein, 13 aa, Homo sapiens
LLELLTVCLLGSL

SEQ ID NO: 71826 - protein, 57 aa, Homo sapiens
LILYYAFLMEYIVLNVGLVFLPEDMDQALVDLGVLSDPGSGLYDADSELDVFDAYLE

SEQ ID NO: 71827 - protein, 16 aa, Homo sapiens
LILKLFFLIINLSILG

SEQ ID NO: 71828 - protein, 41 aa, Homo sapiens
VAKWWASLTAVVIHWLRRDEEAAERLCPLVEHLPRVLQESE

SEQ ID NO: 71829 - protein, 53 aa, Homo sapiens
RIALLILAITIHNVPEGLAVGVGFGAIEKTASATFESARVLNLVSCPGLNLPS

SEQ ID NO: 71830 - protein, 352 aa, Homo sapiens
LPLALVLLAMRLAFERFIGLPLSRWLGVRDQTRRQVKPNATLEKHFLTEGHRPKEPQLSLLAAQCGLTLQQTQRWFRRRRNQDRPQLTKKFCEASWRFLFYLSSFVGGLSVLYHESWLWAPVMCWDRYPNQTLKPSLYWWYLLELGFYLSLLIRLPFDVKRKDFKEQVIHHFVAVILMTFSYSANLLRIGSLVLLLHDSSDYLLEACKMVNYMQYQQVCDALFLIFSFVFFYTRLVLFPTQILYTTYYESISNRGPFFGYYFFNGLLMLLQLLHVFWSCLILRMLYSFMKKGQMEKDIRSDVEESDSSEEAAAAQEPLQLKNGAAGGPRPAPTDGPRSRVAGRLTNRHTTAT

SEQ ID NO: 71831 - protein, 50 aa, Homo sapiens
RNAEKRSIIFLLCVYTKGCTLERNHINVRIVGKHSVCLVPFVDIKGLTLE

SEQ ID NO: 71832 - protein, 174 aa, Homo sapiens
VVKILVVTVQLILFGLSNQLAVTFREENTIAFRHLFLLGYSDGADDTFAAYTREQLYQAIFHAVDQYLALPDVSLGRYAYVRGGGDPWTNGSGLALCQRYYHRGHVDPANDTFDIDPMVVTDCIQVDPPERPPPPPSDDLTLLESSSSYKNLTLKFHKYCLLTRGGPRVGEAAH

SEQ ID NO: 71833 - protein, 28 aa, Homo sapiens
LSLAAAGTPGLVFTALCPLLLEAQPLVL

SEQ ID NO: 71834 - protein, 32 aa, Homo sapiens
LKGRMFISLWFICPRIFTAMAGTKGKRWSPTS

SEQ ID NO: 71835 - protein, 58 aa, Homo sapiens
LIGTSVVKIPFTILLFFLLHRWCSDKKNAAVMDQEPAGNRTVNSEDSDEQDHQEVSYA

SEQ ID NO: 71836 - protein, 1377 aa, Homo sapiens
LSPPLRPRLLLLLLLLSPPLLLLLLPCEAEAAAAAAAVSGSAAAEAKECDRPCVNGGRCNPGTGQCVCPAGWVGEQCQHCGGRFRLTGSSGFVTDGPGNYKYKTKCTWLIEGQPNRIMRLRFNHFATECSWDHLYVYDGDSIYAPLVAAFSGLIVPERDGNETVPEVVATSGYALLHFFSDAAYNLTGFNITYSFDMCPNNCSGRGECKISNSSDTVECECSENWKGEACDIPHCTDNCGFPHRGICNSSDVRGCSCFSDWQGPGCSVPVPANQSFWTREEYSNLKLPRASHKAVVNGNIMWVVGGYMFNHSDYNMVLAYDLASREWLPLNRSVNNVVVRYGHSLALYKDKIYMYGGKIDSTGNVTNELRVFHIHNESWVLLTPKAKEQYAVVGHSAHIVTLKNGRVVMLVIFGHCPLYGYISNVQEYDLDKNTWSILHTQGALVQGGYGHSSVYDHRTRALYVHGGYKAFSANKYRLADDLYRYDVDTQMWTILKDSRFFRYLHTAVIVSGTMLVFGGNTHNDTSMSHGAKCFSSDFMAYDIACDRWSVLPRPDLHHDVNRFGHSAVLHNSTMYVFGGFNSLLLSDILVFTSEQCDAHRSEAACLAAGPGIRCVWNTGSSQCISWALATDEQEEKLKSECFSKRTLDHDRCDQHTDCYSCTANTNDCHWCNDHCVPRNHSCSEGQISIFRYENCPKDNPMYYCNKKTSCRSCALDQNCQWEPRNQECIALPENICGIGWHLVGNSCLKITTAKENYDNAKLFCRNHNALLASLTTQKKVEFVLKQLRIMQSSQSMSKLTLTPWVGLRKINVSYWCWEDMSPFTNSLLQWMPSEPSDAGFCGILSEPSTRGLKAATCINPLNGSVCERPANHSAKQCRTPCALRTACGDCTSGSSECMWCSNMKQCVDSNAYVASFPFGQCMEWYTMSTCPPENCSGYCTCSHCLEQPGCGWCTDPSNTGKGKCIEGSYKGPVKMPSQAPTGNFYPQPLLNSSMCLEDSRYNWSFIHCPACQCNGHSKCINQSICEKCENLTTGKHCETCISGFYGDPTNGGKCQPCKCNGHASLCNTNTGKCFCTTKGVKGDECQLCEVENRYQGNPLRGTCYYTLLIDYQFTFSLSQEDDRYYTAINFVATPDEQNRDLDMFINASKNFNLNITWAASFSAGTQAGEEMPVVSKTNIKEYKDSFSNEKFDFRNHPNITFFVYVSNFTWPIKIQIAFSQHSNFMDLVQFFVTFFSCFLSLLLVAAVVWKIKQSCWASRRREQLLREMQQMASRPFASVNVALETDEEPPDLIGGSIKTVPKPIALEPCFGNKAAVLSVFVRLPRGLGGIPPPGQSGLAVASALVDISQQMPIVYKEKSGAVRNRKQQPPAQPGTCI

SEQ ID NO: 71837 - protein, 37 aa, Homo sapiens
KMIFPLIMIAMIPIRYILLPRIIEAKYLDVMDAEHRP

SEQ ID NO: 71838 - protein, 15 aa, Homo sapiens
RFTMMVMMMITMIIL

SEQ ID NO: 71839 - protein, 9 aa, Homo sapiens
ISSVWVVVL

SEQ ID NO: 71840 - protein, 16 aa, Homo sapiens
LRFEVNFFYTLLMLIF

SEQ ID NO: 71841 - protein, 20 aa, Homo sapiens
IKLLWKYKKLFLFQMLWIQT

SEQ ID NO: 71842 - protein, 196 aa, Homo sapiens
KKIPFLGVCLGMQLAVIEFARNCLNLKDADSTEFRPNAPVPLVIDMPEHNPGNLGGTMRLGIRRTVFKTENSILRKLYGDVPFIEERHRHRFEVNPNLIKQFEQNDLSFVGQDVDGDRMEIIELANHPYFVGVQFHPEFSSRPMKPSPPYLGLLLAATGNLNAYLQQGCKLSSSDRYSDASDDSFSEPRIAELEIS

SEQ ID NO: 71843 - protein, 41 aa, Homo sapiens
KHGPFLLFLSLLHVHIPLVTTSAFLGKSHHDLYGDNVEEMD

SEQ ID NO: 71844 - protein, 42 aa, Homo sapiens
MVKKYSWILLGVCCSQTQSQLIFTVNDSMAPCSTSTKHLSQL

SEQ ID NO: 71845 - protein, 137 aa, Homo sapiens
MQRLGATLLCLLLAAAVPTAPAPAPTATSAPVKPGPALSYPQEEATLNEMFREVEELMEDTQHKLRSAVEEMEAEEAAAKASSEVNLANLPPSYHNETNTDTKVGNNTIHVHREIHKEECKYDIPHFQKRNPLLLQN

SEQ ID NO: 71846 - protein, 335 aa, Homo sapiens
MGRFQLNHTALLLLPCGLLACHNFLQNFTAAVPPHHCRGPANHTEASTNDSGAWLRATIPLDQLGAPEPCRRFTKPQWALLSPNSSIPGAATEGCKDGWVYNRSVFPSTIVMEWDLVCEARTLRDLAQSVYMAGVLVGAAVFGSLADRLGCKGPLVWSYLQLAASGAATAYFSSFSAYCVFRFLMGMTFSGIILNSVSLVASRVIPLAPPAWQVPVSCTESAEGGCNEREEGGRGKADQGGDELLHPKRVCKCLHLQLNLGPLPNPGHPQGHMLSHGDLRGRQRSSGSGEQGGSCEPESRNGRLPAVAPAGLGLPFVHLPLSAREKQILSSKFQS

SEQ ID NO: 71847 - protein, 49 aa, Homo sapiens
MEKLLFSFFFWKQGLTLLTLSPKLECSGTVTAHCSLHFLDSSDLLTSAF

SEQ ID NO: 71848 - protein, 42 aa, Homo sapiens
MWEIVGPVACSFFLSLGISLPALGPGPCRLPYLLQNFFPQPG

SEQ ID NO: 71849 - protein, 9 aa, Homo sapiens
MRLLITLMI

SEQ ID NO: 71850 - protein, 24 aa, Homo sapiens
MDLKWAIIIYLIFLMDYSPGYFPP

SEQ ID NO: 71851 - protein, 149 aa, Homo sapiens
MAFSTRLSWCFLSWFVCLNSSATSTANNSRCEGELRLGERVLVVGQRLGTIRFFGTTNFAPGYWYGIELEKPHGKNDGSVGGVQYFSCSPRYGIFAPPSRVQRVTDSLDTLSEISSNKQNHSYPGFRRSFSTTSASSQKEINRRNAFSK

SEQ ID NO: 71852 - protein, 23 aa, Homo sapiens
MITLKVLFWAYICLEVCVCLGNL

SEQ ID NO: 71853 - protein, 31 aa, Homo sapiens
MSSLLGFFGSFGLCSCVLSACELGESGVPAI

SEQ ID NO: 71854 - protein, 37 aa, Homo sapiens
MIRMGWARWLMPIILALWEVKEGGSLGPRSSRPAWAT

SEQ ID NO: 71855 - protein, 29 aa, Homo sapiens
MYSLIFFRVIQILVLIPYMSTSKVSEQHT

SEQ ID NO: 71856 - protein, 18 aa, Homo sapiens
MVILLGWAVDLIRFAFSC

SEQ ID NO: 71857 - protein, 780 aa, Homo sapiens
VRKLSISWQFLIVLVLILQILSALDFDPYRVLGVSRTASQADIKKAYKKLAREWHPDKNKDPGAEDKFIQISKAYEILSNEEKRSNYDQYGDAGENQGYQKQQQQREYRFRHFHENFYFDESFFHFPFNSERRDSIDEKYLLHFSHYVNEVVPDSFKKPYLIKITSDWCFSCIHIEPVWKEVIQELEELGVGIGVVHAGYERRLAHHLGAHSTPSILGIINGKISFFHNAVVRENLRQFVESLLPGNLVEKVTNKNYVRFLSGWQQENKPHVLLFDQTPIVPLLYKLTAFAYKDYLSFGYVYVGLRGTEEMTRRYNINIYAPTLLVFKEHINRPADVIQARGMKKQIIDDFITRNKYLLAARLTSQKLFHELCPVKRSHRQRKYCVVLLTAETTKLSKPFEAFLSFALANTQDTVRFVHVYSNRQQEFADTLLPDSEAFQGKSAVSILERRNTAGRVVYKTLEDPWIGSESDKFILLGYLDQLRKDPALLSSEAVLPDLTDELAPVFLLRWFYSASDYISDCWDSIFHNNWREMMPLLSLIFSALFILFGTVIVQAFSDSNDERESSPPEKEEAQEKTGKTEPSFTKENSSKIPKKGFVEVTELTDVTYTSNLVRLRPGHMNVVLILSNSTKTSLLQKFALEVYTFTGSSCLHFSFLSLDKHREWLEYLLEFAQDAAPIPNQYDKHFMERDYTGYVLALNGHKKYFCLFKPQKTVEEEEAIGSCSDVDSSLYLGESRGKPSCGLGSRPIKGKLSKLSLWMERLLEGSLQRFYIPSWPELD

SEQ ID NO: 71858 - protein, 16 aa, Homo sapiens
RITKETGSFHILILVM

SEQ ID NO: 71859 - protein, 448 aa, Homo sapiens
KPFWVGGALLAMLQGPRALASAAGQTPKVVPAMSPTELWPSGLSSPQLCPATATYYTPLYPQTAPPAAAPGTCLDATPHGPEGQVVRCLPAGRLPAKRKLDLEGIGRPVVPEFPTPKGKCIRVDGLPSPKTPKSPGEKTRYDTSLGLLTKKFIYLLSESEDGVLDLNWAAEVLDVQKRRIYDITNVLEGIQLIRKKAKNNIQWVGRGMFEDPTRPGKQQQLGQELKELMNTEQALDQLIQSCSLSFKHLTEDKANKRLAYVTYQDIRAVGNFKEQTVIAVKAPPQTRLEVPDRTEDNLQIYLKSTQGPIEVYLCPEEVQEPDSPSEEPLPSTSTLCPSPDSAQPSSSTDPSIMEPTASSVPAPAPTPQQAPPPPSLVPLEATDSLLELPHPLLQQTEDQFLSPTLACSSPLISFSPSLDQDDYLWGLEAGEGISDLFDSYDLGDLLIN

SEQ ID NO: 71860 - protein, 37 aa, Homo sapiens
LRWRLLATALIALCRRSASSVASGEPPDSPPCPWRRR

SEQ ID NO: 71861 - protein, 380 aa, Homo sapiens
LLVGSQLAVMMYLSLGGFRSLSALFGRDQGPTFDYSHPRDVYSNLSHLPGAPGGPPAPQGLPYCPERSPLLVGPVSVSFSPVPSLAEIVERNPRVEPGGRYRPAGCEPRSRTAIIVPHRAREHHLRLLLYHLHPFLQRQQLAYGIYVIHQAGNGTFNRAKLLNVGVREALRDEEWDCLFLHDVDLLPENDHNLYVCDPRGPRHVAVAMNKFGYSLPYPQYFGGVSALTPDQYLKMNGFPNEYWGWGGEDDDIATRVRLAGMKISRPPTSVGHYKMVKHRGDKGNEENPHRFDLLVRTQNSWTQDGMNSLTYQLLARELGPLYTNITADIGTDPRGPRAPSGPRYPPGSSQAFRQEMLQRRPPARPGPLSTANHTALRGSH

SEQ ID NO: 71862 - protein, 447 aa, Homo sapiens
LAVLLTLPVALPVGQLLELAARPGRLRERVLELARGGGDPYSDLSKGVLRCRTVEDVLTPLEDCFMLDASTVLDFGVLASIMQSGHTRIPVYEEERSNIVDMLYLKDLAFVDPEDCTPLSTITRFYNHPLHFVFNDTKLDAVLEEFKRGKSHLAIVQKVNNEGEGDPFYEVLGLVTLEDVIEEIIRSEILDESEDYRDTVVKRKPASLMAPLKRKEEFSLFKVSDDEYKVTISPQLLLATQRFLSREVDVFSPLRISEKVLLHLLKHPSVNQEVRFDESNRLATHHYLYQRSQPVDYFILILQGRVEVEIGKEGLKFENGAFTYYGVSALTVPSSVHQSPVSSLQPIRHDLQPDPGDGTHSSAYCPDYTVRALSDLQLIKVTRLQYLNALLATRAQNLPQSPENTDLQVIPGSQTRLLGEKTTTAAGSSHSRPGVPVEGSPGRNPGV

SEQ ID NO: 71863 - protein, 18 aa, Homo sapiens
MLLIFLTMRSGNWMVFLC

SEQ ID NO: 71864 - protein, 58 aa, Homo sapiens
ISYIVLLSILLWPLVVYHELIQRMYTRLEPLLMQLDYSMKAEANALHHKHDKRSKGLP

SEQ ID NO: 71865 - protein, 512 aa, Homo sapiens
ILHLTVLLFSRCMVEAWNFLRQHCNRLNIEELLKHMYEVCQEMGLMEDLLKLPFTDTEQECLVKFLQSSASIQSHEFLLVHHLQHANYVPPLKLNQTLKINVMNDRDPRLRERSLARNSILDQYGKILPRVHRKLAIERAKPYHLSTSSVFRLVSRPKPLSAVPKQVVTGTVLTRSVFINNVLSKIGEVWASKEPINSTTPFNSSKIEEPSPIVYSLPAPELPEAFFGTPISKASQKISRLLDLVVQPVPRPSQCSEFIQQSSMKSPLYLVSRSLPSSSQLKGSPQAISRASELHLLETPLVVNKAKSLAMSVTTSGFSEFTPQSILRSTLRSTPLASPSPSPGRSPQRLKETRISFVEEDVHPKWIPGAADDSKLEVFTTPKKCAVPVETEWLKSKDRTTSFFLNSPEKEHQEMDVGSQSLEKLDVSKGNSSVSITSDETTLEYQDALSPEDLEETVFTASKPKSSSTALTTNVTEQTEKDGDKDVFASEVTPSDLQKQMGNLEDAETRIS

SEQ ID NO: 71866 - protein, 24 aa, Homo sapiens
LHLLLMIVLLTQGNVSMTSTCPLM

SEQ ID NO: 71867 - protein, 440 aa, Homo sapiens
IGLIFLHNIVVVSNCFYFQAFLDEFTNWSRINPNKARIPMAGDTQGVVGTVSKPCFTAYEMKIGAITFQVATGDIATEQVDVIVNSTARTFNRKSGVSRAILEGAGQAVESECAVLAAQPHRDFIITPGGCLKCKIIIHVPGGKDVRKTVTSVLEECEQRKYTSVSLPAIGTGNAGKNPITVADNIIDAIVDFSSQHSTPSLKTVKVVIFQPELLNIFYDSMKKRDLSASLNFQSTFSMTTCNLPEHWTDMNHQLFCMVQLEPGQSEYNTIKDKFTRTCSSYAIEKIERIQNAFLWQSYQVKKRQMDIKNDHKNNERLLFHGTDADSVPYVNQHGFNRSCAGKNAVSYGKGTYFAVDASYSAKDTYSKPDSNGRKHMYVVRVLTGVFTKGRAGLVTPPPKNPHNPTDLFDSVTNNTRSPKLFVVFFDNQAYPEYLITFTA

SEQ ID NO: 71868 - protein, 10 aa, Homo sapiens
LFMLFEVVAL

SEQ ID NO: 71869 - protein, 136 aa, Homo sapiens
KCPYLNFFQLLVLAGLSHFCSGVIHVTKEVKEVATLSCGHNVSVEELAQTRIYWQKEKKMVLTMMSGDMNIWPEYKNRTIFDITNNLSIVILALRPSDEGTYECVVLKYEKDAFKREHLAEVTLSVKGWWDFLILL

SEQ ID NO: 71870 - protein, 12 aa, Homo sapiens
MIILMSNVFLFF

SEQ ID NO: 71871 - protein, 17 aa, Homo sapiens
MTDLSVLFVIIFLRMKA

SEQ ID NO: 71872 - protein, 20 aa, Homo sapiens
VMRIFLLQAVFKLVSVTLGI

SEQ ID NO: 71873 - protein, 43 aa, Homo sapiens
VAVVLSSVCLLVIVGLLMFRYHRRGGYDVENEEKVKLGMTNSH

SEQ ID NO: 71874 - protein, 495 aa, Homo sapiens
IPRGVYPQALLLFPILVTFEEAMETPTPLPPVPASPTCNPAPRTIQIEFPQHSSSLLESLNRHRLEGKFCDVSLLVQGRELRAHKAVLAAASPYFHDKLLLGDAPRLTLPSVIEADAFEGLLQLIYSGRLRLPLDALPAHLLVASGLQMWQVVDQCSEILRELETSGGGISARGGNSYHALLSTTSSTGGWCIRSSPFQTPVQSSASTESPASTESPVGGEGSELGEVLQIQVEEEEEEEEDDDDEDQGSATLSQTPQPQRVSGVFPRPHGPHPLPMTATPRKLPEGESAPLELPAPPALPPKIFYIKQEPFEPKEEISGSGTQPGGAKEETKVFSGGDTEGNGELGFLLPSGPGPTSGGGGPSWKPVDLHGNEILSGGGGPGGAGQAVHGPVKLGGTPPADGKRFGCLCGKRFAVKPKRDRHIMLTFSLRPFGCGICNKRFKLKHHLTEHMKTHAGALHACPHCGRRFRVHACFLRHRDLCKGQGWATAHWTYK

SEQ ID NO: 71875 - protein, 34 aa, Homo sapiens
RFLFLLPFCLCSPNVPVSPLPHLGPLFGPCGQSC

SEQ ID NO: 71876 - protein, 35 aa, Homo sapiens
KAHWTYTLGWTVLFLTALPNPVYHQEIVWTYMKRS

SEQ ID NO: 71877 - protein, 21 aa, Homo sapiens
LLNYLKQVFRILNIMLLSLPF

SEQ ID NO: 71878 - protein, 151 aa, Homo sapiens
KYLLLSILGLAFLSEAAARKIPKVGHTFFQKPESCPPVPGGSMKLDIGIINENQRVSMSRNIESRSTSPWNYTVTWDPNRYPSEVVQAQCRNLGCINAQGKEDISMNSVPIQQETLVVRRKHQGCSVSFQLEKVLVTVGCTCVTPVIHHVQ

SEQ ID NO: 71879 - protein, 66 aa, Homo sapiens
IASAGGLFMTSLILFIWYCTCKSLPSPFWQPLYSHPPSMHTYSQPYSARSRLSAIEIDIPVVSHTT

SEQ ID NO: 71880 - protein, 124 aa, Homo sapiens
ILILLIVCFIRRNKGGKYPVKEKEDAHADPEIQPMKEDDGTFGEYSDAEDHKPLKKGSRTPSDRTVKKEDSDDSLVDYGEGVNGQFNEDGSFIGQYSGKKEKEPAEGNESSEAPSPVNAMNSFV

SEQ ID NO: 71881 - protein, 18 aa, Homo sapiens
IILFIFFQEMLILTRWHP

SEQ ID NO: 71882 - protein, 35 aa, Homo sapiens
IQVIAFLSPLSLIFLAKFLKKADTRDSRQACLGER

SEQ ID NO: 71883 - protein, 10 aa, Homo sapiens
MCFGCMICLV

SEQ ID NO: 71884 - protein, 16 aa, Homo sapiens
IQKFAIMYFYVFMPCD

SEQ ID NO: 71885 - protein, 654 aa, Homo sapiens
TLPLAVALLLASCSLSPTSLAETVHCDLQPVGPERGEVTYTTSQVSKGCVAQAPNAILEVHVLFLEFPTGPSQLELTLQASKQNGTWPREVLLVLSVNSSVFLHLQALGIPLHLAYNSSLVTFQEPPGVNTTELPSFPKTQILEWAAERGPITSAAELNDPQSILLRLGQAQGSLSFCMLEASQDMGRTLEWRPRTPALVRGCHLEGVAGHKEAHILRVLPGHSAGPRTVTVKVELSCAPGDLDAVLILQGPPYVSWLIDANHNMQIWTTGEYSFKIFPEKNIRGFKLPDTPQGLLGEARMLNASIVASFVELPLASIVSLHASSCGGRLQTSPAPIQTTPPKDTCSPELLMSLIQTKCADDAMTLVLKKELVAHLKCTITGLTFWDPSCEAEDRGDKFVLRSAYSSCGMQVSASMISNEAVVNILSSSSPQRKKVHCLNMDSLSFQLGLYLSPHFLQASNTIEPGQQSFVQVRVSPSVSEFLLQLDSCHLDLGPEGGTVELIQGRAAKGNCVSLLSPSPEGDPRFSFLLHFYTVPIPKTGTLSCTVALRPKTGSQDQEVHRTVFMRLNIISPDLSGCTSKGLVLPAVLGITFGAFLIGALLTAALWYIYSHTRSPSKREPVVAVAAPASSESSSTNHSIGSTQSTPCSTSSMA

SEQ ID NO: 71886 - protein, 12 aa, Homo sapiens
VIILTFLSFSAV

SEQ ID NO: 71887 - protein, 64 aa, Homo sapiens
IFLFATLGLRSLPISTEENAVETNFVDRETVGTALQSILTAHLRILTIRTHISLQEASWPSQTT

SEQ ID NO: 71888 - protein, 63 aa, Homo sapiens
VSTVFSTSSLGIGLFVAVGSVSPSGKEDLGFPTPPSSPLAEVTTLTSYLDKLSTSLDWEPLGD

SEQ ID NO: 71889 - protein, 172 aa, Homo sapiens
LQLEQLTILGAVLLVTFSMAAPGISSQADFAEKLKMIVKILLTDMHLPSFHLKDVLTTIGEKVCLEVSSCLSLCGSSPFTTDKETVLKGQIQAVASPDDPIRRIMESRILTFLETYLASGHQKPLPTVPGGLSPVQRELEEVAIKFARLVNYNKMVFCPYYDAILSKILVRS

SEQ ID NO: 71890 - protein, 12 aa, Homo sapiens
KIYILAFEMLFI

SEQ ID NO: 71891 - protein, 29 aa, Homo sapiens
IYIYIYIPICIFFTDSDVCSEIVNHESST

SEQ ID NO: 71892 - protein, 21 aa, Homo sapiens
LKKILKSSLYYLLMPGCLTTL

SEQ ID NO: 71893 - protein, 27 aa, Homo sapiens
KGLLLLLFLTLALFLSNPWTRICKAYS

SEQ ID NO: 71894 - protein, 25 aa, Homo sapiens
LFTCLQVGLLSSLVVSLASVKENPL

SEQ ID NO: 71895 - protein, 22 aa, Homo sapiens
LLIIIFILSKFMPKVMSSQLDS

SEQ ID NO: 71896 - protein, 921 aa, Homo sapiens
LLGASVLLIAVRWLVRRLGPRPGGLGRSGTPVPPPSAAAAPASGEMTMDALLARLKLLNPDDLREEIVKAGLKCGPITSTTRFIFEKKLAQALLEQGGRLSSFYHHEAGVTALSQDPQRILKPAEGNPTDQAGFSEDRDFGYSVGLNPPEEEAVTSKTCSVPPSDTDTYRAGATASKEPPLYYGVCPVYEDVPARNERIYVYENKKEALQAVKMIKGSRFKAFSTREDAEKFARGICDYFPSPSKTSLPLSPVKTAPLFSNDRLKDGLCLSESETVNKERANSYKNPRTQDLTAKLRKAVEKGEEDTFSDLIWSNPRYLIGSGDNPTIVQEGCRYNVMHVAAKENQASICQLTLDVLENPDFMRLMYPDDDEAMLQKRIRYVVDLYLNTPDKMGYDTPLHFACKFGNADVVNVLSSHHLIVKNSRNKYDKTPEDVICERSKNKSVELKERIREYLKGHYYVPLLRAEETSSPVIGELWSPDQTAEASHVSRYGGSPRDPVLTLRAFAGPLSPAKAEDFRKLWKTPPREKAGFLHHVKKSDPERGFERVGRELAHELGYPWVEYWEFLGCFVDLSSQEGLQRLEEYLTQQEIGKKAQQETGEREASCRDKATTSGSNSISVRAFLDEDDMSLEEIKNRQNAARNNSPPTVGAFGHTRCSAFPLEQEADLIEAAEPGGPHSSRNGLCHPLNHSRTLAGKRPKAPRGEEAHLPPVSDLTVEFDKLNLQNIGRSVSKTPDESTKTKDQILTSRINAVERDLLEPSPADQLGNGHRRTESEMSARIAKMSLSPSSPRHEDQLEVTREPARRLFLFGEEPSKLDQDVLAALECADVDPHQFPAVHRWKSAVLCYSPSDRQSWPSPAVKGRFKSQLPDLSGPHSYSPGRNSVAGSNPAKPGLGSPGRYSPVHGSQLRRMARLAELAAL

SEQ ID NO: 71897 - protein, 27 aa, Homo sapiens
IGLFCSFLLFSLLRDLLVEDIRFFSFS

SEQ ID NO: 71898 - protein, 9 aa, Homo sapiens
KVGIIVICF

SEQ ID NO: 71899 - protein, 712 aa, Homo sapiens
LLATLLLLLLGGALAHPDRIIFPNHACEDPPAVLLEVQGTLQRPLVRDSRTSPANCTWLILGSKEQTVTIRFQKLHLACGSERLTLRSPLQPLISLCEAPPSPLQLPGGNVTITYSYAGARAPMGQGFLLSYSQDWLMCLQEEFQCLNHRCVSAVQRCDGVDACGDGSDEAGCSSDPFPGLTPRPVPSLPCNVTLEDFYGVFSSPGYTHLASVSHPQSCHWLLDPHDGRRLAVRFTALDLGFGDAVHVYDGPGPPESSRLLRSLTHFSNGKAVTVETLSGQAVVSYHTVAWSNGRGFNATYHVRGYCLPWDRPCGLGSGLGAGEGLGERCYSEAQRCDGSWDCADGTDEEDCPGCPPGHFPCGAAGTSGATACYLPADRCNYQTFCADGADERRCRHCQPGNFRCRDEKCVYETWVCDGQPDCADGSDEWDCSYVLPRKVITAAVIGSLVCGLLLVIALGCTCKLYAIRTQEYSIFAPLSRMEAEIVQQQAPPSYGQLIAQGAIPPVEDFPTENPNDNSVLGNLRSLLQILRQDMTPGGGPGARRRQRGRLMRRLVRRLRRWGLLPRTNTPARASEARSQVTPSAAPLEALDGGTGPAREGGAVGGQDGEQAPPLPIKAPLPSASTSPAPTTVPEAPGPLPSLPLEPSLLSGVVQALRGRLLPSLGPPGPTRSPPGPHTAVLALEDEDDVLLVPLAEPGVWVAEAEDEPLLT

SEQ ID NO: 71900 - protein, 46 aa, Homo sapiens
VSPLSPRRMAARVFYLLLVLSAQQILHVKQEKPYGRLLIQPGPRFH

SEQ ID NO: 71901 - protein, 23 aa, Homo sapiens
KFHLLMINTLFGLASFSCMQLDD

SEQ ID NO: 71902 - protein, 35 aa, Homo sapiens
IVALPPERGWMQLLVFLGVTVIGNTDTVTHPPSYL

SEQ ID NO: 71903 - protein, 48 aa, Homo sapiens
KGRGFFFFFKAILEVFSCGRSAPLLLLSPLSPTPSGLILFKIFSPILR

SEQ ID NO: 71904 - protein, 19 aa, Homo sapiens
VDCWSLGVILFICTGLKCH

SEQ ID NO: 71905 - protein, 22 aa, Homo sapiens
ITLLGLLGYLHFVKIDQETVNH

SEQ ID NO: 71906 - protein, 160 aa, Homo sapiens
LAFIVLFLLWPFAWLQVAGLSEEQLQEPITGWRKTVCHNGVLGLSRLLFFLLGFLRIRVRGQRASRLQAPVLVAAPHSTFFDPIVLLPCDLPKVVSRAENLSVPVIGALLRFNQAILVSRHDPASRRRVVEEVRRRATSGGKWPQVGKGLKTIFSLSMCS

SEQ ID NO: 71907 - protein, 30 aa, Homo sapiens
VTPGLRCLAWVLTMLLKLVQNSSQSLTSAS

SEQ ID NO: 71908 - protein, 39 aa, Homo sapiens
VRRILNHRIGLNWSLFMLSGIPGVSLKSCLPIPENIMAT

SEQ ID NO: 71909 - protein, 219 aa, Homo sapiens
LLPILAMLMALCVHCHRLPGSYDSTSSDSLYPRGIQFKRPHTVAPWPPAYPPVTSYPPLSQPDLLPIPRSPQPLGGSHRTPSSRRDSDGANSVASYENEEPACEDADEDEDDYHNPGYLVVLPDSTPATSTAAPSAPALSTPGIRDSAFSMESIDDYVNVPESGESAEASLDGSREYVNVSQELHPGAAKTEPAALSSQEAEEVEEEGAPDYENLQELN

SEQ ID NO: 71910 - protein, 23 aa, Homo sapiens
LLALWALAAVALPGSGAEGDGGW

SEQ ID NO: 71911 - protein, 51 aa, Homo sapiens
LAWISFLTRSCPTCPIVMACVLLSWSQCTVCSVNSSHQALLTPRVSVPLVL

SEQ ID NO: 71912 - protein, 31 aa, Homo sapiens
ISTNSAVLFWHMLVTFPLAKRPPTVLPCLRR

SEQ ID NO: 71913 - protein, 52 aa, Homo sapiens
IALLILAITIHNVPEGLAVGVGFGAIEKTASATFESARVLNLVSCPGLNLPS

SEQ ID NO: 71914 - protein, 54 aa, Homo sapiens
ISALLLLAAAGCLPFNDSQVISSASWTSHSCTSTDSMVAAVPVDFWDSFSCSVQ

SEQ ID NO: 71915 - protein, 15 aa, Homo sapiens
ICFFTFNCTFWIFLQ

SEQ ID NO: 71916 - protein, 129 aa, Homo sapiens
LGLMFCLIALSTDFWFEAVGPTHSAHSGLWPTGHGDIISGHGPLVSTTAAFAAGKDSGLDWGIASQRIPAEELSHLSCPCPQPSPWWWPWRCTPASGGTSLHTPRSRPSSPGPSTWAGSQLSSCSVQVP

SEQ ID NO: 71917 - protein, 356 aa, Homo sapiens
KPRSAPNMAGGRCGPQLTALLAAWIAAVAATAGPEEAALPPEQSRVQPMTASNWTLVMEGEWMLKFYAPWCPSCQQTDSEWEAFAKNGEILQISVGKVDVIQEPGLSGRFFVTTLPAFFHAKDGIFRRYRGPGIFEDLQNYILEKKWQSVEPLTGWKSPASLTMSGMAGLFSISGKIWHLHNYFTVTLGIPAWCSYVFFVIATLVFGLFMGLVLVVISECFYVPLPRHLSERSEQNRRSEEAHRAEQLQDAEEEKDDSNEEENKDSLVDDEEEKEDLGDEDEAEEEEEEDNLAAGVDEERSEANDQGPPGEDGVTREEVEPEEAEEGISEQPCPADTEVVEDSLRQRKSQHADKGL

SEQ ID NO: 71918 - protein, 20 aa, Homo sapiens
VILILLCFHCRLIGISRTGT

SEQ ID NO: 71919 - protein, 727 aa, Homo sapiens
LVVFVGGTLVLGTILFLVSQGLLSLQAKQEYCLKPECIEAAAAILSKVNLSVDPCDNFFRFACDGWISNNPIPEDMPSYGVYPWLRHNVDLKLKELLEKSISRRRDTEAIQKAKILYSSCMNEKAIEKADAKPLLHILRHSPFRWPVLESNIGPEGVWSERKFSLLQTLATFRGQYSNSVFIRLYVSPDDKASNEHILKLDQATLSLAVREDYLDNSTEAKSYRDALYKFMVDTAVLLGANSSRAEHDMKSVLRLEIKIAEIMIPHENRTSEAMYNKMNISELSAMIPQFDWLGYIKKVIDTRLYPHLKDISPSENVVVRVPQYFKDLFRILGSERKKTIANYLVWRMVYSRIPNLSRRFQYRWLEFSRVIQGTTTLLPQWDKCVNFIESALPYVVGKMFVDVYFQEDKKEMMEELVEGVRWAFIDMLEKENEWMDAGTKRKAKEKARAVLAKVGYPEFIMNDTHVNEDLKAIKFSEADYFGNVLQTRKYLAQSDFFWLRKAVPKTEWFTNPTTVNAFYSASTNQIRFPAGELQKPFFWGTEYPRSLSYGAIGVIVGHEFTHGFDNNGRKYDKNGNLDPWWSTESEEKFKEKTKCMINQYSNYYWKKAGLNVKGKRTLGENIADNGGLREAFRAYRKWINDRRQGLEEPLLPGITFTNNQLFFLSYAHVRCNSYRPEAAREQVQIGAHSPPQFRVNGAISNFEEFQKAFNCPPNSTMNRGMDSCRLW

SEQ ID NO: 71920 - protein, 48 aa, Homo sapiens
MLVSAFGLCRLSSCRAPRGVRTRRSARWALSSPAAFEVSAALGLCGGE

SEQ ID NO: 71921 - protein, 98 aa, Homo sapiens
MRRWQTSYYLGAPAASAGSHGSPWQPSRSAWQRSKPAAQPPCRRAERGCPRRRLPGPSWTCRPPKSCQISMAIHPKSSSESPWRTWTPSIAPKRLSSY

SEQ ID NO: 71922 - protein, 74 aa, Homo sapiens [sequence omitted]

SEQ ID NO: 71923 - protein, 47 aa, Homo sapiens
MEFFIPTSVDLKILPLSACLGSAVSSLPWFSDDACNNAMRFAHSWRK

SEQ ID NO: 71924 - protein, 91 aa, Homo sapiens
MEFFIPTSVDLKILPLSACLGSAVSSLPWFSDDACNNAMRFAHSWAEKPSEKDPDSVVCAVTFGSVFSASESLRLPSCCSVGTPRTRAGQG

SEQ ID NO: 71925 - protein, 80 aa, Homo sapiens
MQWPEVPALPLLSSLCMAMVRKSSALGKEVGRRVKEMVMLVAPFRQSSSLSRTFSSRKVVKAHASLHGARLSPLSRNIRG

SEQ ID NO: 71926 - protein, 27 aa, Homo sapiens
MTRSLLLPGICEQLPGSGQDPFLLLIG

SEQ ID NO: 71927 - protein, 80 aa, Homo sapiens
MRESPTQVKLRSKTVYRVNLSVIMKKWQSSKKVVVMGRWRSTSPFVLWVTGCPPLLWGAHQQLRGEGQPCCTSTDIRSRQ

SEQ ID NO: 71928 - protein, 46 aa, Homo sapiens
LRTVLAVAAAAPVSRWARTQPLGAVAFPASQRQKRGSGTQKVGLRL

SEQ ID NO: 71929 - protein, 174 aa, Homo sapiens
MTLSPLRAWPGRKPWSWRLLWAPLPSLGLPAPPRRMGPLSGPAVAFLALRAPTQPRLAPCLHPPHRLPPWAGPGHHSRGPQCHHHLQSASARRWGCCSSLGTPRPSRSPRRMTPTSGWPTSLGQMPTVAKWPGTTSPASSSVTSHCCSTSGQPQRAQGCCSPSRTRRRPWSCWA

SEQ ID NO: 71930 - protein, 64 aa, Homo sapiens
VPAAALAFAAAAAAPGSAAATPSGLSHGVSTGAGRPAVLLGPARVLDWWGAAWGQGGAAKGEAI

SEQ ID NO: 71931 - protein, 102 aa, Homo sapiens
LGRTPLPLILAVAGSLPGTPLVSLGLPLHATSLSKSEDISTWTPDHVPALSSEAHQASLLWAAGPGPGLWTLGSWQAPSAVGSGPRPHHVEPRRWLPGCRRQ

SEQ ID NO: 71932 - protein, 93 aa, Homo sapiens
LPPGATLCQAPEGGWLGRELRGFPGAGMSAAGLSSPCPTFLFSSLVSPTLLLPQAVPDAEFRLSRLFLVPGKAERRSSNGLVLRASGENQRSN

SEQ ID NO: 71933 - protein, 95 aa, Homo sapiens
VPGQRLLDRYGHTQPLCVIQAKPPSTYMSCSTTTLSRSSLCLAAALSPRWWLRLLGCGTSLCFPMAPAHQPCQTGSVSPLSSERTHQPHSTTLPA

SEQ ID NO: 71934 - protein, 76 aa, Homo sapiens
VRGQALRLDGGHWAGAWSPAGWAAAAAAAASQRGAQRPPRQVVSRPSASVATPARGQPTVPRAPGGGGTAQVQRGS

SEQ ID NO: 71935 - protein, 67 aa, Homo sapiens
MCHKGWHGPGVPHHVAFTPCKARLRPATQCQAHSSPRRKMVQAGSIPLAAASGRLCLTHAGWWRGAS

SEQ ID NO: 71936 - protein, 24 aa, Homo sapiens
VSSLLALQALPLPLGLDGGYLKVK

SEQ ID NO: 71937 - protein, 68 aa, Homo sapiens
MDRAAAQSLWAPTASSLLFLQSSHRPQPQPGPEPPEVVPLTGHPPAGGGRELFHAYGLPRFGTHFSTP

SEQ ID NO: 71938 - protein, 68 aa, Homo sapiens
LCPPLGPKTSILLLGSLAQGQGAQRAASARNANSCSQRRLRSQLCQLLRTHFDQRSNRDLWVGVLWRS

SEQ ID NO: 71939 - protein, 195 aa, Homo sapiens
VRLGGPGWRRGGRFGPLAAPGALSVGGEAAAAAATCPDFSVPGSACSESAAEPEGPTDVRALCGSQMAQGGALTAARLPGAAGPGAGLAGLRVRARGTVRAGLPAAAALRAGRGPPRHAAAPGGGTRGERAHQPGRGLAGPDRSQWRPGLDQGCSQLLENLDGLRVPSAAIAEPLSIHGTLKLHLAYLLDLLGQS

SEQ ID NO: 71940 - protein, 63 aa, Homo sapiens
LYTAPRKGAPRGRSLKPCLSFTFTFFFFSLEERRTECSILPYLCFYSGTNVGCVCVCFLVLVF

SEQ ID NO: 71941 - protein, 169 aa, Homo sapiens
MVSGRRPQPIHFASLPLPLPRAASSAALQFRRRLPHPALPFQGRRITRPRTRLANWAFLRAGLEQVARLRVRVGKSLNRQPCCPVGFLCLWRERESGQTSKPNSSIPEALMQLWWRPLSFLCQCLVILQRDAALHRDAHAVSHTSLHHLDCPALCILKPTACRSRHFSI

SEQ ID NO: 71942 - protein, 36 aa, Homo sapiens
VYRAALLAAIRPQVGALAHLSRAGAAGPWDSALSPA

SEQ ID NO: 71943 - protein, 72 aa, Homo sapiens
LLPGRSRGSAALGWPKGWRCDPAGQRRDSGAGRLLPPELGVRGRNELGAAAVAAGAVRAAPALGAAAALPEG

SEQ ID NO: 71944 - protein, 96 aa, Homo sapiens
VARGTRGRRGAGAVLTAAVLVGPVHAAHAEAALLRAVPLPTRRGRVGAAHRQELLPAWMKRRSRLCPPLRKIPSLFRSGETGFHHVSQDGLDLLTS

SEQ ID NO: 71945 - protein, 123 aa, Homo sapiens
VEGPAGQRRGLLLLWPAQICLRAGLAQPGPGAALRPAGPDAVALRPEAHRGPVRLQRALLLPLSQDPAGFQCPPAAAAGGLHHGPSGRLPTRPAGPCPRLHRPGAPHRRGLLHPHRHVLRPLQ

SEQ ID NO: 71946 - protein, 136 aa, Homo sapiens
LLLLWPAQICLRAGLAQPGPGAALRPAGPDAVALRPEAHRGPVRLQRALLLPLSQDPAGFQCPPAAAAGGLHHGPSGRLPTRPAGPCPRLHRPGAPHRRGEEALGLGDGGCLSSATLVPCSLLVPAPLGPPTLAPL

SEQ ID NO: 71947 - protein, 36 aa, Homo sapiens
VASHPRRRGAAALLGDLPAALTSAGCSMGRKRCPAD

SEQ ID NO: 71948 - protein, 40 aa, Homo sapiens
LAFGCTCSGIFSTRGRHRRRLASSGLICATCPLHTPPPSW

SEQ ID NO: 71949 - protein, 77 aa, Homo sapiens
VAASLPCAGPQEATRKRPPPCAPPLRLARWLPAPPDVSYLLTALPGALLAPFCPSSVSAAAGSCSGAEWLTSVLQMH

SEQ ID NO: 71950 - protein, 131 aa, Homo sapiens
VRRRSRRCEETASAQLLCLWLGGAAGSPAQRRRRPGTPDSAQLAAIPNPSDRLPERCRHRENGGTEEQDVPRPRELGLAKWRCWDPKSDASRRSSQGQHPFWRNQRCCHAENVDPRKREVLRPRNSVQQVL

SEQ ID NO: 71951 - protein, 77 aa, Homo sapiens
LVLAAAATSLPLAAVLCRGTYTPPVLSARSRACRCLLLHANAGGQDHVSGKPEFAPPPPPRCKGYCAQQQLGRNAGP

SEQ ID NO: 71952 - protein, 53 aa, Homo sapiens
LAKFVILRNSAVLSSTASFCLPCSFPDVIQVAEFRCPCFGSLSLCLSFFPCSR

SEQ ID NO: 71953 - protein, 60 aa, Homo sapiens
LDYPRQGLCNIFFRLFWKDFAASRRSWTSALALWEGFGLSGSDFAISPWGLPWSRIHCGL

SEQ ID NO: 71954 - protein, 40 aa, Homo sapiens
LLRLVRRRSRNPAFFFSLRHGLTLSPLLECSGAITDHGSV

SEQ ID NO: 71955 - protein, 24 aa, Homo sapiens
LHRVAWSCLSVLPATCLSSHPSTD

SEQ ID NO: 71956 - protein, 82 aa, Homo sapiens
MEPPSPSPTHLSCIFFLLITVSPLEASSTRARVFPCLPLYAECPEQSLAQGKEKSHPGGGGERPGLAGQGEPDHPAGARDGR

SEQ ID NO: 71957 - protein, 26 aa, Homo sapiens
VPGAAAAGAVIAPAAAGRAGERGQGY

SEQ ID NO: 71958 - protein, 55 aa, Homo sapiens
MRRGAALATSAAAARLGPERRAGSQVMVVSSEGELSPARLVSTVELVATPAGWRA

SEQ ID NO: 71959 - protein, 116 aa, Homo sapiens
MRRLDWPSLPAYIFLLCWMLPALEHQTPGSSVLGLGLAFLAPQLADGLLWDIVIMAQCLSKDLEHGATFFLSQEVMSHYVAQTDLEPLASSDPLTSASQSAGITGMSHCTPPLSLF

SEQ ID NO: 71960 - protein, 116 aa, Homo sapiens
MRRLDWPSLPAYIFLLCWMLPALEHQTPGSSVLGLGLAFLAPQLADGLLWDIVIMAQCLSKDLEHGATFFLSQEVRSHYVAQTDLEPLASSDPLTSASQSAGITGMSHCTPPLSLF

SEQ ID NO: 71961 - protein, 56 aa, Homo sapiens
LVYAVRGGRRRQRGAERGRRGLSRAAAAAVGPPAPAGGPKNAGRGPGGPAPGRPQP

SEQ ID NO: 71962 - protein, 233 aa, Homo sapiens
LLPPALRMASSVPVRGHTLPPSLALGGQLGAQVGGRAVLSCTAAWWQCGESHFCPPGLLSPGRQPQPQPQPQAQLPLALISSQAEGSEASGPKPLPSPLSRTDALPRVCLLSVLTTVTPRMARASVPTASRLLSGGGAAVPLVSAIPLPPWARPWTRQVPVPSPNPTHAPSSSQTNETTLRFRCPRLPCNGSANPMARWGLTPEEEPGSRAFLTNSQLCPSPQETHVHLCDHV

SEQ ID NO: 71963 - protein, 69 aa, Homo sapiens
MAAVWVAAAAAAAGAASSSSTGTRASSPTCSTTTAPASCTAPRTCAGRSSKRSSPSGASTRPTWNPAAG

SEQ ID NO: 71964 - protein, 37 aa, Homo sapiens
MRNTSPMVVLLSFMLTWMNSHFCLQWRWRDFLRSFLL

SEQ ID NO: 71965 - protein, 112 aa, Homo sapiens
LEAGDGRIAGDFFFFKQGLTLLPRLECNGAITAHCSLNLLGSSNPPTSASWVASTMACATMPYFFFLKTGSCYIAQAGLELGSSDPHALASQSAGIIGMSHCAWPGFFFFFF

SEQ ID NO: 71966 - protein, 56 aa, Homo sapiens
MKAVWWSWSCGLSPRREAATDRRCGLSLPVPQRALPVQLPRGPAGLCRAGCGGGLL

SEQ ID NO: 71967 - protein, 90 aa, Homo sapiens
LRSRACVLGSNRCFLPLLFLCLPPISVRRADKGAILEGPRETWCRCGLALPCARLGGKACSRVRAFRHRHVGRWCDSWPRREQRLPHLRG

SEQ ID NO: 71968 - protein, 45 aa, Homo sapiens
MFNNSAGSSCFVSAAFGFRSPLLQWPRWLHRSVWRAGTCTGRREP

SEQ ID NO: 71969 - protein, 103 aa, Homo sapiens
VCRRRRMRRLLSGCGWRWSEAWCSSLVSFCLSLSSLGPPARGTVITSPREVVRAARRWAAGSPGGRAGGAETSAGLMSALSARGPSLPVRAGHCRMAPLLCGC

SEQ ID NO: 71970 - protein, 73 aa, Homo sapiens
MTKRARSLSSPASSSPQPSPKSRPRLMGWLRAPMVGGSATSHGSAWTEAQRAAPRRPGLASQRPCMTLRCQAT

SEQ ID NO: 71971 - protein, 57 aa, Homo sapiens
MVAATTCVPSGMGLLLPPEASCSNIDGPACQRVPLPSKNECLRSVLLWPQFSSFGTT

SEQ ID NO: 71972 - protein, 86 aa, Homo sapiens
VPASFAAASAVLSAGASILPEHGECCSPLPILIPSPPGLSAESRQISVVLCPKLPQDDGSWGQASPSGIVHCSSTLPTDQRNPSGQ

SEQ ID NO: 71973 - protein, 34 aa, Homo sapiens
LGMGCWQGSKSLFLLISYSTNTSSDDFPKLMRMR

SEQ ID NO: 71974 - protein, 78 aa, Homo sapiens
LTSAPSPNPQMLHFFGIPGLSMGGRDAWPKHLEQGTPYPLVATSPLLWPPEISLSAVAPSTALMGLFSHLLLVSRGNF

SEQ ID NO: 71975 - protein, 59 aa, Homo sapiens
LESLSPCSPLPWHSCMHFKGSLWGLGFLPLPGLGPAPNPASPAPAHPHIGALLLLWCLK

SEQ ID NO: 71976 - protein, 141 aa, Homo sapiens
LRRRRLAGWERAEWGARRWRWWREAVPRSSGPRHHVQPAAAAAAPATAAAAPAVTAAAAPAAAIAAAAVTAAPAAAPAVPTTGPVAHGCQPGAPPAAATAAASESPGHQLSLPPQRLHAAESFAFTAVARTGPVCNATSHV

SEQ ID NO: 71977 - protein, 116 aa, Homo sapiens
LRARGEASHHVQPAAAAAAPATAAAAPAVTAAAAPAAAIAAAAVTAAPAAAPAVPTTGPVAHGCQPGAPPAAATAAASESPGHQLSLPPQRLHAAESFAFTAVARTGPVCNATSHV

SEQ ID NO: 71978 - protein, 116 aa, Homo sapiens
MRRTRDRGHHVQPAAAAAAPATAAAAPAVTAAAAPAAAIAAAAVTAAPAAAPAVPTTGPVAHGCQPGAPPAAATAAASESPGHQLSLPPQRLHAAESFAFTAVARTGPVCNATSHV

SEQ ID NO: 71979 - protein, 111 aa, Homo sapiens
MKSHHVQPAAAAAAPATAAAAPAVTAAAAPAAAIAAAAVTAAPAAAPAVPTTGPVAHGCQPGAPPAAATAAASESPGHQLSLPPQRLHAAESFAFTAVARTGPVCNATSHV

SEQ ID NO: 71980 - protein, 61 aa, Homo sapiens
LALKLLLARLGSWLAGAEADRHGSRRGVKWSSDARTRPISLSSTAMFLLLSCCKATHLRFP

SEQ ID NO: 71981 - protein, 26 aa, Homo sapiens
VGLWSVCVCVSVCVCVCMCVSGAWPG

SEQ ID NO: 71982 - protein, 79 aa, Homo sapiens
LKRRVGKSADLKLFLLKKKKKKLCAAHSGVFFFRLLFSSPLPLLPFESFFSSPCPPSPPDRMADSTPVSINFFFLLFLI

SEQ ID NO: 71983 - protein, 43 aa, Homo sapiens
VVAAGGGRQRSSHEGRAQSPTCEPLPHVVLMPICHASLSTRAR

SEQ ID NO: 71984 - protein, 83 aa, Homo sapiens [sequence omitted]

SEQ ID NO: 71985 - protein, 214 aa, Homo sapiens
LIAGGSLAQRPARLTALPALPSPARAPAGTAAAPRAAPASARAPAAAPTPARTPARVPAPPAALAAAAPAAAPAAPAAATSSSSAAAAASALAGFLYVGSARALRVARAAGGRAPGAGERLCVRVCVCAGVRARRRASVCARRGPCPPPPALRPAPLPAAACAISDFATWGRRKKREKGACSPGGGEGGRRARPPQERSAGGAGEGSRGVGGGA

SEQ ID NO: 71986 - protein, 38 aa, Homo sapiens
LLHLPPSYLVPCRAPGLFGGTLGCTSGLPAPAAWAPPS

SEQ ID NO: 71987 - protein, 47 aa, Homo sapiens
LFHSNASLNVLSQSTLVINRSTLSSTRRDCLRDPGKGLCQAVWGTDF

SEQ ID NO: 71988 - protein, 67 aa, Homo sapiens
MSSGMHWMWMTTALSTRGLRAAGPRSMLTSSAPSAGLSMSVGGRSGSSSPQGRKRPCGTATATCPTT

SEQ ID NO: 71989 - protein, 61 aa, Homo sapiens
MTRTWTSSPLSPWPLQHAPAAGAVLGTLLPVPSSRHYPPRWALLTMRPTEPCWPLIAHTVQ

SEQ ID NO: 71990 - protein, 141 aa, Homo sapiens
LAQVEAPATLGEAAAHSRAAVAVAAMVTTTMAAAVVAAAVAAAVAAAVAAAVVAAVATVVAAEVTAAVSPPGDPAPAPPPATTVGAAEEMDINPGVKSQGMKPAGAGNLGFRTLRRLLGCLTLTLSGRILNPSWVSSTGMP

SEQ ID NO: 71991 - protein, 113 aa, Homo sapiens
LLLASFPALWAIQMMRNGGSRTHLPCPSCEGPASSHSWPSRGPRWPGLTSPDPGPCPSAARAGPGPPHCVPEGPAHPTVPHGASRGPPAPRPASDGQPRWGQRALHTQPCAAA

SEQ ID NO: 71992 - protein, 42 aa, Homo sapiens
MRSTLLLTCSAGVSYRIPWQLAVDTCRAVRRPVGAVGVLQRQ

SEQ ID NO: 71993 - protein, 148 aa, Homo sapiens
LRFTKHSASPTVILTVLSGGLTQVAVQPFRPRAARSEARSPAWKRSAVGRAPLRLGGLGFPQQRSSTAQSSLTPDATSYLGPELNSRRCGPPSLNLFSQDLSPTAKQPWAGAATSPRHPFGAADIQRGRTRERALSCFTARVREFAAA

SEQ ID NO: 71994 - protein, 80 aa, Homo sapiens
MLVAPCSGEGLRHPQRRSGQDQGVLGFFLSLPQHIACSQGSSFVSLLLLPGLWSGHHHLLPTLSTASSLSPRLHAILFHM

SEQ ID NO: 71995 - protein, 45 aa, Homo sapiens
LKEKKMTCLLTAVGIHTQTRGFGIKVMLVPKKNWAEFLFLRSDVV

SEQ ID NO: 71996 - protein, 52 aa, Homo sapiens
LGKRTRAPSWGTGSFAFYFFSCSQGAHVFETDRISSSMWRQVDFSRLAGISF

SEQ ID NO: 71997 - protein, 38 aa, Homo sapiens
LPCSLSTTPSSTDQRTRSSMLTMPVSTSFSLAVTTWFC

SEQ ID NO: 71998 - protein, 87 aa, Homo sapiens
LIFFSYCRSLRLWLLQGHHELGLLVSSFPCLVSFSQFSQKPCPGPCSSPSPQPLTPATSGRMGSSSHSPRSQSPPWMGLQPELSMRP

SEQ ID NO: 71999 - protein, 142 aa, Homo sapiens
LRKSTLWGPTPCDVCLVACSLFYLQSTVPIRAARSASCLIWKTTTLGSQRNDGSLGVSKIGSEWPHGDGGPVSGSLGPPEMVLHISILKTGEVRPQTSQAFSFHWKLDIFPPGFLGKPNGAQKAVWTSVWVLSWSSDVYCYF

SEQ ID NO: 72000 - protein, 41 aa, Homo sapiens
MKCGSILCSGLAASPGRICLQTGLLLYQLVPGPAGTRKIHP

SEQ ID NO: 72001 - protein, 78 aa, Homo sapiens
MCFLNPPTPNLSPLCLSLLLAVFLFSFSSALVSWTPLLCPFFLFITQSAVIVISMASSLHSSSCFQPPKPEHCLASNH

SEQ ID NO: 72002 - protein, 75 aa, Homo sapiens
LVRQTFPTLCPAGAHASVAAAADPDSWKRTIRGGPKSCTSPQSSMVHSLQRRKSGSHMQQHITFPSPGRHILVSR

SEQ ID NO: 72003 - protein, 66 aa, Homo sapiens
LGRAGSARGLLCISLHFSDVWSSPGPGRSGVRAGAGGVGLGVGAAFPAAGEPFASELDPGDITALG

SEQ ID NO: 72004 - protein, 49 aa, Homo sapiens
MFCFPCLMPVLHLSLQFHCVSLLLGILKSGTKLLHDPCTFASAYIIALL

SEQ ID NO: 72005 - protein, 241 aa, Homo sapiens [sequence omitted]

SEQ ID NO: 72006 - protein, 88 aa, Homo sapiens
LRRLAQTRKRMAWTESCTAACAFPSCLVLLYRGRGVPTDLQVPAPLFSTQSKLKRPGESPISKDSCYVRKPPRRAKKRSQGWLFLRDA

SEQ ID NO: 72007 - protein, 103 aa, Homo sapiens
LLLLLLLLLLLLLLLLLLLLLLLLLGPGWRHLTTPRSSHFPSSPPPPSPPPPPLPPFITLCVILHSSREGTQKWGAGKMYIEDVSFYMWEVDIEGFMVYRQDL

SEQ ID NO: 72008 - protein, 97 aa, Homo sapiens
MGERAGQFLANKRWLTALTSAVNSAHLASGATPASAVTSTTVATGWRSLVGTTNTSMSAVAKISSTSTTCSGLPPSSTLLACSWASSLPLSLEALRT

SEQ ID NO: 72009 - protein, 86 aa, Homo sapiens
LRRLTALTSAVNSAHLASGATPASAVTSTTVATGWRSLVGTTNTSMSAVAKISSTSTTCSGLPPSSTLLACSWASSLPLSLEALRT

SEQ ID NO: 72010 - protein, 66 aa, Homo sapiens
LGSGALVPASAAAAAGSQWPGVLGSHRPAASIAPNLRGAAAGALGRRGSAKAADAIFLPRRSQGNR

SEQ ID NO: 72011 - protein, 36 aa, Homo sapiens
LENWKQGKRWRIWSLFLSWKMFWGPATSDILCSPRL

SEQ ID NO: 72012 - protein, 164 aa, Homo sapiens [sequence omitted]

SEQ ID NO: 72013 - protein, 52 aa, Homo sapiens
LVLPVPKSQGPEGGPCFLFLFLCVSDGDFADSCQENASLNSPHVPRDVYRTV

SEQ ID NO: 72014 - protein, 63 aa, Homo sapiens
MRVPQLGSATSCGVALAPGAAATSPPAQPPGCSSPTRLGCLCCTLSHSGWNPGPGTRQRSLLR

SEQ ID NO: 72015 - protein, 40 aa, Homo sapiens
MTQLLSRVSGLPSASAGSARAQSASAPPTDPGKVSGLPQS

SEQ ID NO: 72016 - protein, 51 aa, Homo sapiens
VDLLPHQAHPVHRVPDDHAAGWLQWTTCLVLSGSGFGGSLSVVEPVTEAVL

SEQ ID NO: 72017 - protein, 64 aa, Homo sapiens
MHMADAGLAQALVCPPARPHERQPRCLGVLQEQALQQAHPGDRPQRVCSVEACGPQLCSEGISE

SEQ ID NO: 72018 - protein, 208 aa, Homo sapiens
MGACATPATAAAPVAWAGRGGTASWPVPLGATEPPAIWSAPATTTARVSLPRAPAAAAPASMARPASTPVPLASTGLAARGCAGVNMEPPATPSVADASALPASTATSVRGGVSQVHLERAATSAVTVTGGHPVTLSPVSAFAHQGAQEPPVTWIAEGASLGPAAPCTVTAGVGLTATLSVGSVTVWMATWGPRAGKVGPSGSPRTRP

SEQ ID NO: 72019 - protein, 63 aa, Homo sapiens
MWVKCHPQPFVGPWAPCTSWASSSASSSPRQLDETSKPDRCQPSRAWGSFLQPAMMSRRIFRT

SEQ ID NO: 72020 - protein, 109 aa, Homo sapiens
MRPSEGCLIAPALLTTLSQPLPSPHPQGLTAPHPLQAGTQLGISPAVTDFVQAKDLAGPDAVPSPRPGMGVGVPELMWCPLSLSEWLRLIPLTYLQSPSTQGRPDVATG

SEQ ID NO: 72021 - protein, 25 aa, Homo sapiens
LCWGTAAVVAAAIAQTAGSACRSPA

SEQ ID NO: 72022 - protein, 31 aa, Homo sapiens
VRSLHVAILPLLKALNGPVANDLLSRQERGE

SEQ ID NO: 72023 - protein, 53 aa, Homo sapiens
VTGTAQALGDCGSGSSRPSTPGARPSGPCLGGACVGRGACRWAPRPRLGFLVP

SEQ ID NO: 72024 - protein, 34 aa, Homo sapiens
VIATIMDVDRCRGILQPNWISICICFLIPSSLAE

SEQ ID NO: 72025 - protein, 90 aa, Homo sapiens
VAAAAAGPAAAAAAAAAATTSLLPRGAAARAPRAAHPAVLSAARPRWRALPPPVPAAPSVVLRLALGLPRQPQPQPQRHPQPQPQPQPQA

SEQ ID NO: 72026 - protein, 56 aa, Homo sapiens
LPAAGFHLARACCFLRARPLPPVLLFVPFCFPHSLPQLIARHLGPCPHSPSTLQGT

SEQ ID NO: 72027 - protein, 40 aa, Homo sapiens
LGLQVIIRFEIFKVDTKLFQQCRQLSVLLWAMVLLVKHVS

SEQ ID NO: 72028 - protein, 160 aa, Homo sapiens
LRLTLLLPAARHLRGGPPTRPRATRFKKKKKAALSPLLPFPASARTPSLPPAPPAQAPLPWKPSGFARISPPPPLAILQYRGKADHGESGQQLAAAPGDGRLPLLEAVRRLRGQDCGPLSALCHGQLLAQPVPQVLLLPGAAGRHRHVLLHQKWHDPLQK

SEQ ID NO: 72029 - protein, 27 aa, Homo sapiens
VMPNPVLCTQVTLWLCPLLMPALQQLS

SEQ ID NO: 72030 - protein, 31 aa, Homo sapiens
VSRRRLKSELLGFAQIGVGRACLWGAATPYC

SEQ ID NO: 72031 - protein, 46 aa, Homo sapiens
LASSYDFTNGSSKLLSSALTACAPASVRARFLAWGSNHVDKMGSVS

SEQ ID NO: 72032 - protein, 74 aa, Homo sapiens
MPPGRLLCPLGLQPEACPSALGPDPRPPAACNQTLFASSRHPPSPAPHTVPGSPLPRRSVPLPSPVTFACWSPG

SEQ ID NO: 72033 - protein, 28 aa, Homo sapiens
LAVFHSLCVHAAGGASGPGGAAAEYFWL

SEQ ID NO: 72034 - protein, 132 aa, Homo sapiens
MRAFGRTRSTLRVRTLQPPTACAGVVAWPAAGSRICAALSRCTGVGRSDFKPRQQPMKKQILTANAVRQGPANYSPGAKPRCHFFLQVQLIGHSHVHQATHRPTHLRLQHRAASTAQTPHAAIYGKRWPSLL

SEQ ID NO: 72035 - protein, 25 aa, Homo sapiens
MRAPCFGSLTCTQARTWTRCWSGRT

SEQ ID NO: 72036 - protein, 58 aa, Homo sapiens
MCKLHQEIPLHSGLPAAGHTQEELCLPIWLLLLPGLLLHMCQEDPGAGLLPWFLWHAV

SEQ ID NO: 72037 - protein, 81 aa, Homo sapiens
LKIQYQMHLRSFLLLLLLHRVLQGKAILWLPVVLWIIFQILVTVKFLHDPVLLAIRLLTQCQSHCTMRGARGILSASWKQT

SEQ ID NO: 72038 - protein, 117 aa, Homo sapiens
MAATPRLWSSTGRSCSFGSALTTLWAVPWPTARSESAWPRWRTTRLPCSTSTSTWSWHIPCATTRSCRGPGPPSAAPTWTSMTTASRGMLCCRHRLPLRRAWLLWMRSWRGHWPRES

SEQ ID NO: 72039 - protein, 72 aa, Homo sapiens
LLLPESPASPSSTSVCALLLPPFPSTAHSSSSRPLSTLSKHITGDLIATRSECVCCHPAWPGQAWHSLGFHA

SEQ ID NO: 72040 - protein, 61 aa, Homo sapiens
MGHTPLLMAGSIGWTETTTAGHNAAGDAWGRGGRQVWARRSLCWGTQGFKPCSEHIAQRVS

SEQ ID NO: 72041 - protein, 92 aa, Homo sapiens
VCGSEPDFISPKASRPEETRWVLSVLAAVGGTGASSPSPVLPARSPESRWSSSRPPTSSQPTFRGERRQAGPSSDQASPEVGTPLCVPLRSR

SEQ ID NO: 72042 - protein, 58 aa, Homo sapiens
MRKAHAWPPPACSLAVVRLRAARRGRQAGIQPGSLETLTHPPSHLGSAYPPALREDEA

SEQ ID NO: 72043 - protein, 43 aa, Homo sapiens
VRQSCRAGTRATGLTGYRRTEPGWTRTWKALGTLPPGRLSTCA

SEQ ID NO: 72044 - protein, 39 aa, Homo sapiens
LNLSLVVALTVPYSHRMGCCLLSVLENMGNLVIIQHRMS

SEQ ID NO: 72045 - protein, 52 aa, Homo sapiens
MKWRSPMSIIAMSAAGSNPHNLWVVALQCHRSNHLIFELGVLSFSETMSCVT

SEQ ID NO: 72046 - protein, 120 aa, Homo sapiens
LRGAPARWRRRRRWPSRRAPGTAAATAAASSVWRASCAPASRRATTTRRTRCTGPCSSGTCPRASTRRPGSSCTREPCSSSAMASKTVQQTCPCWSWSPWRRRKWRWLTSCWKIWLKCSA

SEQ ID NO: 72047 - protein, 104 aa, Homo sapiens
LRLLGRGGRRVLVLVLRLSASLPQQQRAAARHAGRGALHLPQAPPHQSGERRGRWGRGPPGGRLRGRPHLEPDGLRRQETAQQVRRLSRGGERGRQEGQGDHSR

SEQ ID NO: 72048 - protein, 205 aa, Homo sapiens
LGEQYGKSCENLLTSESSVEPRLGLWSAYFLQSDCSCLRWSLSVPLWGTSALISALTAAVRAAGKWGAPSGGRVAVSLLISSVTFKLSLEATAAAGHVRRALGCWGKISSAGSRDRAGGRRGTAPRPRLGTWEGRAGALGPGARPSWDTREDGGGEEVGSAAGELGIMQMGKENLRPRPSAKSSLGICRYCGHVMEGSGKYGLIF

SEQ ID NO: 72049 - protein, 208 aa, Homo sapiens
LAAWLLQLLTAPVSEQPCWGRSLSAPQREPRTSQPLVSGGDPSWDEEDPLGLSADPHLLHSCAQAPRVVHAGQPPAVHRPPVWSRDLIYLFIAWPVTRGRRRPCHLSHLLLPLGAACTFSPPIRQQSESTWRTGPEDERGLDILPTVSQPGQGGTMARRVKGPRCAQLPQGGRSWGDGQSGGPSLVSAHTARTHRGLPGFSGPHVSVL

SEQ ID NO: 72050 - protein, 46 aa, Homo sapiens
MSRFALPALGIPLFPSASAALPFSGAQLWSFHPARQRGEGARAASG

SEQ ID NO: 72051 - protein, 36 aa, Homo sapiens
LLSVASGSSLPLFLLVPINELFSALGKKSPPAIMRI

SEQ ID NO: 72052 - protein, 17 aa, Homo sapiens
LLYSRLSVLKQSKTLKV

SEQ ID NO: 72053 - protein, 46 aa, Homo sapiens
LPRAAGLKAAGASCAEVAQLLWRRRANTWCLGVAAPPLAVSSFPFG

SEQ ID NO: 72054 - protein, 108 aa, Homo sapiens
VRRSPSFPPFILAQTRLGRTGPLALCLLLLLHGAMRLGGGSREKLACGRAGRAARTGRGEGGRQAEEEAAGRRRRRRPGRTRGIPRAAGGLSRAGTRVLRYPSSHRRQ

SEQ ID NO: 72055 - protein, 84 aa, Homo sapiens
MRTLPPGLPRASASIATASPWLWLVHPWPAFRREPSRAGELGRPPGPRSRTWGTRGPEPQPAEEAVAGDSMDRGWQFQEWMEVL

SEQ ID NO: 72056 - protein, 46 aa, Homo sapiens
LQPERGGALSPVLLSSSASELVSSSRRDSLCQLSREKRNFQLKTLS

SEQ ID NO: 72057 - protein, 92 aa, Homo sapiens
VASAGRAISAGALLPPPGASAALDVCARRRLSVAPKLLPGSDLVRRLRSRTLARKEPRDSCGQSRVESWAFSLRVFWWFPPWSLTIALREPC

SEQ ID NO: 72058 - protein, 59 aa, Homo sapiens
LAAGLGPLRKSIRAAAAAAAAAAAASAAEEDSAARAPPATSAAESHRHRMPEKHVGTQH

SEQ ID NO: 72059 - protein, 22 aa, Homo sapiens
KMAAVPGSVAAAAVGLRAGRAH

SEQ ID NO: 72060 - protein, 80 aa, Homo sapiens
RSRRRERARWRRRRSGSGYRARAERGGAGVFQRTSLQTFAILTLSCQGTQAYEEVLLHKTVSSEDDKKEGKGSEKEAKIL

SEQ ID NO: 72061 - protein, 1029 aa, Homo sapiens
LDLRGKKKREGEREKEEQERSRKEEEVAKNQLPCWICLSQHLGEALGFFLKGLIFRTPHLSSLLPASSLLWWLGCFFHDFLNLDWAVLCVKPISCDLLLTEVESTASILASVKEQEAQFEKLTRALEEERRHVSAQLERVRVSPQDANPLMANGTLTRRHQNGRFVGDADLERQKFSDLKLNGPQDHSHLLYSTIPRMQEPGQIVETYTEEDPEGAMSVVSVETSDDGTTRRTETTVKKVVKTVTTRTVQPVAMGPDGLPVDASSVSNNYIQTLGRDFRKNGNGGPGPYVGQAGTATLPRNFHYPPDGYSRHYEDGYPGGSDNYGSLSRVTRIEERYRPSMEGYRAPSRQDVYGPQPQVRVGGSSVDLHRFHPEPYGLEDDQRSMGYDDLDYGMMSDYGTARRTGTPSDPRRRLRSYEDMIGEEVPSDQYYWAPLAQHERGSLASLDSLRKGGPPPPNWRQPELPEVIAMLGFRLDAVKSNAAAYLQHLCYRNDKVKTDVRKLKGIPVLVGLLDHPKKEVHLGACGALKNISFGRDQDNKIAIKNCDGVPALVRLLRKARDMDLTEVITGTLWNLSSHDSIKMEIVDHALHALTDEVIIPHSGWEREPNEDCKPRHIEWESVLTNTAGCLRNVSSERSEARRKLRECDGLVDALIFIVQAEIGQKDSDSKLVENCVCLLRNLSYQVHREIPQAERYQEAAPNVANNTGPHAASCFGAKKGKGKKPIEDPANDTVDFPKRTSPARGYELLFQPEVVRIYISLLKESKTPAILEASAGAIQNLCAGRWTYGRYIRSALRQEKALSAIADLLTNEHERVVKAASGALRNLAVDARNKELIGKHAIPNLVKNLPGGQQNSSWNFSEDTVISILNTINEVIAENLEAAKKLRETQGIEKLVLINKSGNRSEKEVRAAALVLQTIWGYKELRKPLEKEGWKKSDFQVNLNNASRSQSSHSYDDSTLPLIDRNQKSDKKPDREEIQMSNMGSNTKSLDNNYSTPNERGDHNRTLDRSGDLGDMEPLKGTTPLMQKI

SEQ ID NO: 72062 - protein, 88 aa, Homo sapiens
MSSCGTLTWATSSPAHPTWAPGCGQVCISSCPTWASMRSSRRCLSGCDFRSEAQAVWTRLRWAGSSTSPTLTAWASQRWSWCRWWWTE

SEQ ID NO: 72063 - protein, 41 aa, Homo sapiens
VLGCGPGRKAARGSSTASAAASSACATAAGAGPLCWSGMRP

SEQ ID NO: 72064 - protein, 82 aa, Homo sapiens
LEENVPGIEFFLEAKYSEVDGRGLRSSTFALVPVFAHLSILQSLVPAAGAASPVAISAQHLCYSHVTPGDPGAGAGQGPAPS

SEQ ID NO: 72065 - protein, 68 aa, Homo sapiens
MFTAQSMCSPLCTPSQPGAGAHCSGLPQGGSRVSPSAPGGMGVEPGILNTSLRGGINKTVSVPPAPRS

SEQ ID NO: 72066 - protein, 29 aa, Homo sapiens
LETPRDMVLLCCQSGLKLLALSDSLTSDS

SEQ ID NO: 72067 - protein, 38 aa, Homo sapiens
VMCARFRKAAHSRFLGVSAAVGSWGQGPGCWGVGRGSR

SEQ ID NO: 72068 - protein, 24 aa, Homo sapiens
MRLSLLQLGLFHTPCSCAMPGGTV

SEQ ID NO: 72069 - protein, 82 aa, Homo sapiens [sequence omitted]

SEQ ID NO: 72070 - protein, 37 aa, Homo sapiens
MLLSLVSNPLPLSLTPLFSTRLSLSPRWVSILEVSHP

SEQ ID NO: 72071 - protein, 139 aa, Homo sapiens
MEVSSKPHRAPAAAPLAGWAPSAPCPAQRAFTDPTAPRNVAATTAASVTDSLGSAAALRVTLGIGAGRSARWAALGRTVLRRATAPRTPVASRPTAHVCANTASLGTAARIASAPTASTVSAARPPAPATGSTASAATR

SEQ ID NO: 72072 - protein, 81 aa, Homo sapiens
MRRRWRTGYKARPGARISPLAAATAIRRTCSASSWAPGKGQVSPRTEPPPAALSSRSWPSRSSTRENKLLLLLPIRFWGDL

SEQ ID NO: 72073 - protein, 27 aa, Homo sapiens
MSRAAAAAAAAEGRCASTKWWCWARAG

SEQ ID NO: 72074 - protein, 28 aa, Homo sapiens
MFEDCFILPLVPAVSLFCDQCDSQELLK

SEQ ID NO: 72075 - protein, 96 aa, Homo sapiens
MKRGALRFYLPCYIVFLGKAVLPYSKPLPSLPTQDLGTGGARHLMPCPRLAGPSISAGELSSADKPAWHGALPLLLVPDPFCPEENFLSPGDAWPR

SEQ ID NO: 72076 - protein, 52 aa, Homo sapiens
MDINPGVKSQGMKPAGAGNLGFRTLRRLLGCLTLTLSGRILNPSWVSSTGMP

SEQ ID NO: 72077 - protein, 57 aa, Homo sapiens
MGFLCLPRSSMRSSTVGILTLSSLQKKRILFIPSLVWLLLQTQRKKKERQPQKRRKK

SEQ ID NO: 72078 - protein, 37 aa, Homo sapiens
KRHSLGGLLLKMGLTLLLPVTTSLTSYTFSTMEWLSL

SEQ ID NO: 72079 - protein, 27 aa, Homo sapiens
MTEITSNSSQTFLVATLGILRFSLACP

SEQ ID NO: 72080 - protein, 22 aa, Homo sapiens
KSSVIFLLTSLKSALKRTATDD

SEQ ID NO: 72081 - protein, 36 aa, Homo sapiens
RQRMKLMVCMVTVLLPIFELLEYKLCLCLECPSQSD

SEQ ID NO: 72082 - protein, 33 aa, Homo sapiens
IHRRKRRRRRRRRPSGGTQQALLPAPAVAASES

SEQ ID NO: 72083 - protein, 28 aa, Homo sapiens
LKMGLTLLLPVTTSLTSYTFSTMEWLSL

SEQ ID NO: 72084 - protein, 9 aa, Homo sapiens
LLIFLTVVS

SEQ ID NO: 72085 - protein, 26 aa, Homo sapiens
LPSGALLVAGVSSAFLVSSTRRLAGF

SEQ ID NO: 72086 - protein, 55 aa, Homo sapiens
MLSPFVPAAWTLPAARPWSSLMSPSLRVWVMRRHIRPPPGACGPPGGRPRQPRAN

SEQ ID NO: 72087 - protein, 38 aa, Homo sapiens
LLAGYFIDTLKVLHMIRKQLWKMTAFISLNILPYGTDQ

SEQ ID NO: 72088 - protein, 41 aa, Homo sapiens
MHLLTISSAFCLPCPPPRMPFQKCLLLSRCALKGRFLASPS

SEQ ID NO: 72089 - protein, 22 aa, Homo sapiens
LSFLGTQQPLAFHPMCSLWPST

SEQ ID NO: 72090 - protein, 132 aa, Homo sapiens
LAPFERLEEEAAVLAPTPTGKGCLSAQMALICPLTAQMVLSCPLAAVLTPPWCSLRPSLRTSATCHLLLTVLARETDILTFVSLCLYQSGNRKEFKKYTSFQEDGNNRLSLQTKQFSGLGCCCCSPAAGRWG

SEQ ID NO: 72091 - protein, 124 aa, Homo sapiens [sequence omitted]

SEQ ID NO: 72092 - protein, 117 aa, Homo sapiens [sequence omitted]

SEQ ID NO: 72093 - protein, 55 aa, Homo sapiens
MTSACWHALFVLPFRACSIPHSHHLDFVFINPLLFYNFPGYTYLSKKYNVYICLF

SEQ ID NO: 72094 - protein, 78 aa, Homo sapiens [sequence omitted]

SEQ ID NO: 72095 - protein, 62 aa, Homo sapiens
VRHMWLYLPHCITAPISQKEAGSSSLTIGPAQPLASRMLQRLWLTVSARLFCCLHVLRIGDP

SEQ ID NO: 72096 - protein, 109 aa, Homo sapiens
MGLVACVLQCSISVGAIIAVISRTAFSPSSSSLSSASSTLILLCGIILFLTFSSCASGNEWWRLDVAPSFLKGYSKKNVLTSKVGFHKEFKDCPGMMDPTEVITRRGQE

SEQ ID NO: 72097 - protein, 67 aa, Homo sapiens
VCMPVCVCVCVCVHVCVHMHVCSRECISSVTHNQGSGACTTSWWLLQPAASGRAAPCREYELIWMSA

SEQ ID NO: 72098 - protein, 229 aa, Homo sapiens
VPCVHMCCWWTSNYYCVLMRSALCFAASNVLVVTCQCLSNLSADHGREPWERGGLAMPPPLLILHPAATSSCRAPPVSVPVFLYFFLSRSVSASLSLSLSIFLSLHWSVSASASLFLCVCFLSQALAWLMAIISTPTHPSQLTTRFPCETLCLPRSRHQDRMRDAQILLGKTPAGENVAARPRTGRDGGLGDTRVSLFLSLSLCISLSLSLSFSAFLSPGLSLVLSVSL

SEQ ID NO: 72099 - protein, 58 aa, Homo sapiens
MEQCGGTLLLWGNSLAGGPVVGRCLQSGSRSAARRAREAREEPAGRGLGKGAPTSLQA

SEQ ID NO: 72100 - protein, 32 aa, Homo sapiens
LWSQLLGRPRWEDLLRPGLPDQPGHRGETPSL

SEQ ID NO: 72101 - protein, 145 aa, Homo sapiens
MRRLDWPSLPAYIFLLCWMLPALEHQTPGSSVLGLGLAFLAPQLADGLLWDIVIMAQCLSKDLEHGATFFLSQEVMVLLCCPDRSAVAQSWLTHNLHLPGSSDSPASASRVAGTTGMHHHAQLICVLLVETGFHHVGQAGLELLT

SEQ ID NO: 72102 - protein, 50 aa, Homo sapiens
LRRPLLLLLLPPPQRLLGLSTPRNRPPRAARRTRCPCRPGRVGRPRDRQT

SEQ ID NO: 72103 - protein, 23 aa, Homo sapiens
MVWPRRRQRLLAAAAAAAGPRAL

SEQ ID NO: 72104 - protein, 68 aa, Homo sapiens
LGRRAAAGGGGHVATAVAARAAAATAAAASARAAGRPPTLPPRGSPSSLHLAPLVPLARPGAALCFSL

SEQ ID NO: 72105 - protein, 89 aa, Homo sapiens
LLFSRLRVVGLHPAFRVLLRGAPVSSPAQAPLQAAVGFRFASGWGCCFSSPTWILYPSETLEPLWSSLHLMTLRGWSFQVLPERNVPSL

SEQ ID NO: 72106 - protein, 69 aa, Homo sapiens
LPLGGFLLDYGRCLLSFAVKQRLIRRLLGGWSLSPTHILASHSGWGLPQRGQLWQGQGPLWDWDEGATP

SEQ ID NO: 72107 - protein, 36 aa, Homo sapiens
LALLFPFAPVAAAERGGSMCAVSGAIPGPVAPEPRV

SEQ ID NO: 72108 - protein, 29 aa, Homo sapiens
MRRAARVTFLQILHAVHLCPRRTTAAHDS

SEQ ID NO: 72109 - protein, 31 aa, Homo sapiens
MAWTGGAGVTFLQILHAVHLCPRRTTAAHDS

SEQ ID NO: 72110 - protein, 77 aa, Homo sapiens
VRSIRQRALRRAGLCACAVWVAPDSLPRPAPPRLRTLAPLSAAALPRSSQPRVRQYVQLGQQGCPPQEGAGALPDGG

SEQ ID NO: 72111 - protein, 48 aa, Homo sapiens
LKMNPHFKSSCLLEVALPVTSLHFSIHGCYSRKSSFLKHISRHMMRLM

SEQ ID NO: 72112 - protein, 30 aa, Homo sapiens
LGPLLLCTLLPSSQISAHLPPRLAAPQLAG

SEQ ID NO: 72113 - protein, 114 aa, Homo sapiens [sequence omitted]

SEQ ID NO: 72114 - protein, 82 aa, Homo sapiens
VALSLLTSQGRQRRAGPSTAFAALPATVATFSAMTESESLRTSRHADTALARVRRGAKFRGQARTRYCARARSHRFTPPSGA

SEQ ID NO: 72115 - protein, 77 aa, Homo sapiens
MQKSFTFLVHCLGSFTWYSLRSRLSEQPRQPDLRMNLSRQSLTKHLQEPSWGESMRRWVRSGQESKHHLATKPKLCV

SEQ ID NO: 72116 - protein, 81 aa, Homo sapiens
LSSKIKNKPVISCAACVSAAIWAKQSCCSRQARSSYEEKQESTADANFSEKTTGQFYLACSFLLFDNNKDYFNLPGISALS

SEQ ID NO: 72117 - protein, 256 aa, Homo sapiens
VDKGWTGRCVSAFCFVFFFLRWSLALLPRLECGGMISAHCNLRLLGSSDFPASERPPVPAHSAPCPVSFRIWPWPLAQPQSLCPPASTASPASAPLPRATLPPLPSVERQLSLTLRSLLPLGRAPAPPLSQPKPSGQLYPPQRVSHFSVPNNCLGGYENKGAWSPPLGGPVHELHRGSSLFFGTGCLSPRLECGGMTSAHCSLDLLGSSDPPALASQSAGITVVSHCAQPPQGLLYTPSMRSAPFVGKFACEPGMS

SEQ ID NO: 72118 - protein, 52 aa, Homo sapiens
LSLVHRIVLILLQIERCTALCCKLSIRQVFSQSDPFKNGFRNHVTALPKVPK

SEQ ID NO: 72119 - protein, 66 aa, Homo sapiens
LVDMLQPRRPRLLREVPGTPRHHLALAPGCLLLESRGAPSPSLPNPRRLTSLSLRVAFAIREPVDP

SEQ ID NO: 72120 - protein, 16 aa, Homo sapiens
MKSAMNIISSNHFSVT

SEQ ID NO: 72121 - protein, 114 aa, Homo sapiens [sequence omitted]

SEQ ID NO: 72122 - protein, 89 aa, Homo sapiens
LSLTQILSGLEMGCRGLAFLGSRATDLSIRVWEEAQAAVQGCDLGSLQSPPTGFSETASQTVDPDKVKDPGKLRTMFVAELPKTIVTDS

SEQ ID NO: 72123 - protein, 228 aa, Homo sapiens [sequence omitted]

SEQ ID NO: 72124 - protein, 108 aa, Homo sapiens
LTPASKCVCVCVCVCVCVCALAVIYDLQWPVCGFGFHCGVENVVCLPSAYVCLGLCVHPSSPALVLRQTKEEGLRTFLASKAPLQACCPTHPAIPRPACIVVCTFICS

SEQ ID NO: 72125 - protein, 64 aa, Homo sapiens
LPPPSLARSPARRLLPLSLPLRMAATAAPPPLKMAKPRPPRLYSPRRHCLPGLVVRGSRAAKAS

SEQ ID NO: 72126 - protein, 52 aa, Homo sapiens
LRAQKAAEASLGPLLSCPWALPWLLSFPTAQPKESPLQLTRVQPPEQRVPQP

SEQ ID NO: 72127 - protein, 145 aa, Homo sapiens
MKRKVDASSVIQSLPHPAAATTQQGKKERKKERREKKVVAPGCVAGRCAELFGRERSFNSESREQNLRGYNQPTRPDGSALSALTPSAPRRPPPPARAAPRAPAPQSPPPALTSGPVAGKGSFLLAPLEKQNQTKQQQQQKLPNL

SEQ ID NO: 72128 - protein, 58 aa, Homo sapiens
LKLPNLSFRRCSLVVAWGVWLFCVVCLHGVVSSELLSRCRPGQGEALWAVDCEAPPHR

SEQ ID NO: 72129 - protein, 80 aa, Homo sapiens
LKLPNLSFRRCSLVVAWGVWLFCVVCLHGVVSSELLSRPPSQKPQKEKVARELLLPWRILCRPGQGEALWAVDCEAPPHR

SEQ ID NO: 72130 - protein, 63 aa, Homo sapiens
MSVTSRARWIYSRSPMGKIWKSVVTIWAWIPKRLSAAIAKQLFSFMAMTAPRLWDIINIIVVY

SEQ ID NO: 72131 - protein, 28 aa, Homo sapiens
LRETGKRGAIETGVGEAGLRGKGGVGEW

SEQ ID NO: 72132 - protein, 69 aa, Homo sapiens
VDFIRQPAMTSSVVGPRRRSKALPKAKLAPKKVMVTIWWSSARLIHCSFLNASETIASEECTQQIDDMH

SEQ ID NO: 72133 - protein, 145 aa, Homo sapiens
LLLKVSLPLFFASLSPFFGFGWVNVFLTNLASCLGSLCLQWNGSPAERGDMSHPILGGLLCPSILATRRGHKHTRDCYSGGGGGNTERKSRHRGNQATSCMSQVHHFHPGDLVLIKAWKEDKLHPSWEGLYQMLLTTKTAVQTAE

SEQ ID NO: 72134 - protein, 68 aa, Homo sapiens
MWKDTSCFNPPSLSFQITWAIDYTINKPHVTLQGTRCVPCSRKPITQDMKVRMDDWLSWNCAPLEETF

SEQ ID NO: 72135 - protein, 95 aa, Homo sapiens
MATASGAGLLFLPTPQAPSHPHAQANVSHTGSGGTDPEQQALAPAPSPAFRVNSCTSWNCLRVLPPSDHGQVQVQCFGSDVSGQAQHSSKEIAAS

SEQ ID NO: 72136 - protein, 51 aa, Homo sapiens
LLTCGCLALSSSACPLLVLPPTGPAHLWLLCSDSLRLSLSPAHLLMLSSVP

SEQ ID NO: 72137 - protein, 26 aa, Homo sapiens
LSSRRCPLLLLPPPALLTCGCSVLVP

SEQ ID NO: 72138 - protein, 69 aa, Homo sapiens
MWRRVERGRRGQMLWLGGHGGGGSLVLCSNPTSFRSGTLCVLCTLGPILPRRLSPSTCRKGGSESRRGR

SEQ ID NO: 72139 - protein, 148 aa, Homo sapiens
LACSLCVPALLCFSAPSVLCAGDTWAFPVPCSHLWSVGRQWRRERWEPGSAGLKVATAKRSAPPATPTRRMRIASAARVVAPQQTQSRRDTAAAPLRRDTAAAPLRPFELFPPYFSVSCYTAILLFICYFRQYPPALYHGHSVRIWFS

SEQ ID NO: 72140 - protein, 67 aa, Homo sapiens
MTTGARRKRTATSRRPRSLRTTRSMRWRRTRLIPIIWRSWKTTTTPVTAQKAASGAIVPTAALQLHS

SEQ ID NO: 72141 - protein, 27 aa, Homo sapiens
LPRLAPVIPALWEAVASDAGGSPEVRS

SEQ ID NO: 72142 - protein, 79 aa, Homo sapiens
MLPVLEHQTSSSSVLGLGLAPCSSASQWPTVGPCDHISFLFSFIKYRRNISLKTQETLFCINEGLQEIVGRSKMGELEG

SEQ ID NO: 72143 - protein, 118 aa, Homo sapiens
MEKALTAALQLFMQHGATFAYGESSSSTPIRTAVQLSIVNANSSEPETRGKKKDKGKAAMSESWEAANKQSRSLSSALPSLSLYVSSWMVEEEQLKCDTLEIVCTRSTIVVPSCGTDI

SEQ ID NO: 72144 - protein, 257 aa, Homo sapiens
VRILLPRPPPPPPSSSSSPSSPSSPFLPLLLHLPPPLPPPPSSPFLPTPPPFPSSSPSSSPSLFLPTPPPSSSSSPSSPFLPLLPILPHSSHSSSPLPPHPSPFYSPFSLLPILPHSSHSSYPLLYFPSPFPPPSPSSSPSSPLLPFLVSLLAPPFPSFYSPFSFQPSPPPFQPPLPPPSTLPSSFSLLPSPLLPPFLLPPPPLPSVLTAVIAVSPTSLTSTGPSEQSRPQFRSVIASMEFGQGLSTSGRSSTQPAP

SEQ ID NO: 72145 - protein, 120 aa, Homo sapiens
MNMQITIFFMLLSGLLFFFSFFLWIQGLTLSPRLECGGMIRAHCSLKLLDSSDLLTSVSRVATNKNAHKQAWLVLNFFGTYKVSLLYAGWSGTPVPMRSSQLGLPKCSDYSHEPQPLASC

SEQ ID NO: 72146 - protein, 53 aa, Homo sapiens
VKYPGVYLSQMRYKLVPSLASLLFLQEEDCLPTPKLHGERAHRRYSICSFEFN

SEQ ID NO: 72147 - protein, 78 aa, Homo sapiens
MMLLLRAEPMRLDAVLILFCCCFICCCHLSLLRADPFPFSLLSVSSLSLSLFLSALCMCVCVCVCVCVCIIEVPINAS

SEQ ID NO: 72148 - protein, 62 aa, Homo sapiens
LFLLTPPLLLTGGAAWKAAALPQTVPNILPGIFTTIKIMNLFITPRSFLVPLCITFVCNRCT

SEQ ID NO: 72149 - protein, 46 aa, Homo sapiens
LGFMGACAALGLLGRAGTWKAAVKENWRQNSAELQPRELKWGVTPG

SEQ ID NO: 72150 - protein, 85 aa, Homo sapiens
MLSLFPQLSLCAVAPFSSSNSRTLMISQNRSTSFFASGKNRFQLSPTNFASWLDISARLAGVILQKSSNSSGKIKCSLNHSSVLM

SEQ ID NO: 72151 - protein, 45 aa, Homo sapiens
LGPVAVLATQAPAAGTPTASARPPPRCPRPRRPRSWRAARLWRTT

SEQ ID NO: 72152 - protein, 42 aa, Homo sapiens
KRCHLAAMAAVVSATPGQGPVECSTMGSTGYRAETALCQLCC

SEQ ID NO: 72153 - protein, 76 aa, Homo sapiens
KRGKVWRDPAPAPPPATTVGAAEEMDINPGVKSQGMKPAGAGNLGFRTLRRLLGCLTLTLSGRILNPSWVSSTGMP

SEQ ID NO: 72154 - protein, 90 aa, Homo sapiens
MATAGAACVSAVAPSDPIGARDLSGAAAAGPGRTGEGDAGRHGDLGRRAGGGGHAGGSAGRGRGGHRAAEKVPMAWGSGARVGKTQDIAS

SEQ ID NO: 72155 - protein, 126 aa, Homo sapiens
MSPAFLWKRPQHLPLCRPPQLGGWSLALAAPFQTYWAPWVPRQMKQAAAPSLHQSGSPPLSNHGQSPPQRICCACPHPPEPTSRMNTATRWAAPYSGSGEPRQPLMPLTRPSASCRPASGGSSGCG

SEQ ID NO: 72156 - protein, 72 aa, Homo sapiens
MRKRRRRRRRWQWRSVTGMMKKTCWMTHPWKACVALSMPSWEKMGSSRRGALQLPHLSLSLQSSLGATKART

SEQ ID NO: 72157 - protein, 97 aa, Homo sapiens
MQSQAAREHKPGASRLLLLLLLPLPPPPPPLPPPALRTRDFSCTTLSACFPPCPEKCDRSPKEFPRQVLGGNDSPVIFPALTQSAGWPPSQGRLLLA

SEQ ID NO: 72158 - protein, 47 aa, Homo sapiens
MLSLSLSLRAASPRSSRRAPARGMRSPRVPPRDQQAARTPSQRQTGT

SEQ ID NO: 72159 - protein, 18 aa, Homo sapiens
MCVCVRLCVFVCLCVLPQ

SEQ ID NO: 72160 - protein, 7 aa, Homo sapiens
LIVLLFA

SEQ ID NO: 72161 - protein, 20 aa, Homo sapiens
VRRQRRQGMLLLGLASPFST

SEQ ID NO: 72162 - protein, 38 aa, Homo sapiens
VVPRRRLPPSALISGAGTAFHSAPVVRSLRLPFRIFRL

SEQ ID NO: 72163 - protein, 49 aa, Homo sapiens
ICSMNENGKFPGLPSAQLSCLPPFASAAHASLSSVFCAWTLWAHPGHGG

SEQ ID NO: 72164 - protein, 38 aa, Homo sapiens
ILKVESPAPAAAAAAVAVVVAAAAAGERARAGKPQSEI

SEQ ID NO: 72165 - protein, 35 aa, Homo sapiens
TSSTRPRWRTLTSTTSLWCSSWGSTARARPPSSDT

SEQ ID NO: 72166 - protein, 45 aa, Homo sapiens
IFLKKIRKHMVKFLKNSIQYVEVFKMLAPVSLIPAVSEFDGTCFL

SEQ ID NO: 72167 - protein, 32 aa, Homo sapiens
IGLVSKTNAIISLKKKEIGIQVNTTVPLNMPT

SEQ ID NO: 72168 - protein, 34 aa, Homo sapiens
MLVLLGCCFSCCWGKGMHLVLFLQPGMPVLPPRI

SEQ ID NO: 72169 - protein, 61 aa, Homo sapiens
KTWPLQSVLSTASSLRPLVMMVQSASVSKAGKGSSSSHGVAAALNQDLDPDPKCHVFNVSK

SEQ ID NO: 72170 - protein, 39 aa, Homo sapiens
MLRSKYLTQLSSGFGFLFSSPKVKLEKFCVRAGRGSSRL

SEQ ID NO: 72171 - protein, 85 aa, Homo sapiens [sequence omitted]

SEQ ID NO: 72172 - protein, 30 aa, Homo sapiens
MQLRSVFCCCCCLFFLFLLLRTVGLCVTAL

SEQ ID NO: 72173 - protein, 37 aa, Homo sapiens
LGTGPSGAVRFLLLPSLRMSPFVALCGPCGIHRRSFI

SEQ ID NO: 72174 - protein, 70 aa, Homo sapiens
MPPARPKRRPKARRRRRLWLKEAQALGTRVRALLLLALRGAGCVGVCTGDSGPGSSSDSVGQASQTPAAA

SEQ ID NO: 72175 - protein, 35 aa, Homo sapiens
MVAPRAAPPAGAFLSGQAVFHGRELLAELPLLSKH

SEQ ID NO: 72176 - protein, 32 aa, Homo sapiens
MVAPRAAPPAGAFLSGQAVFHGRELLAELPLS

SEQ ID NO: 72177 - protein, 47 aa, Homo sapiens
MGTWLPSAGAAVGLRMGPGVAPLRLAVGPSCLSLPLVVHPPGASLRR

SEQ ID NO: 72178 - protein, 59 aa, Homo sapiens
LRRCPRGARRMRTSPRRAAAVSGTARTPAPAAARAVPAPRERALPHLVPASRGSAGNAP

SEQ ID NO: 72179 - protein, 29 aa, Homo sapiens
MFLVGAWKSSSVFLFPQVSVLSYYNMADH

SEQ ID NO: 72180 - protein, 62 aa, Homo sapiens
VAASLRARAARLGELICTAPGVGSGGTGGSAYPSPILIESMLCILSPLHKAERCLQLRVKQK

SEQ ID NO: 72181 - protein, 79 aa, Homo sapiens
LNMAIPAFSSCQQISSAAALQICNGPFKHFSFTVSTMLSFVSRCHWSSIAEESEFLFLILVCYFSSSCSSCIIHQWYYV

SEQ ID NO: 72182 - protein, 27 aa, Homo sapiens
MCFSGLWFSFCASVCENGCVVSVNFVL

SEQ ID NO: 72183 - protein, 34 aa, Homo sapiens
LLHFRQCPVHAMVPRHLSSLWSLWLLSLAAPPVP

SEQ ID NO: 72184 - protein, 105 aa, Homo sapiens [sequence omitted]

SEQ ID NO: 72185 - protein, 25 aa, Homo sapiens
MARGPSAPAAGALHAARARGQPRSW

SEQ ID NO: 72186 - protein, 60 aa, Homo sapiens
LGGSSPWGLLALRLAVAACRRVSVSVRRLRVARLLLTVLLGPKSGASPLLAAASPEIDPQ

SEQ ID NO: 72187 - protein, 83 aa, Homo sapiens [sequence omitted]

SEQ ID NO: 72188 - protein, 62 aa, Homo sapiens
MGLRSFSLPVLWCMPPSWLKNLHQPPLRLGSSLLSFTPRRSSVAPRALPALHPEFTLSPHLV

SEQ ID NO: 72189 - protein, 82 aa, Homo sapiens
MKKREGRLVSSLIAGSATKRSCKPRREKHFNLGHLFAPGNGEWAVRPDFYPVQPAFISVFPHCYSGFGLCWKDNCLIQAAVQ

SEQ ID NO: 72190 - protein, 81 aa, Homo sapiens
MKKREGRLVSLIAGSATKRSCKPRREKHFNLGHLFAPGNGEWAVRPDFYPVQPAFISVFPHCYSGFGLCWKDNCLIQAAVQ

SEQ ID NO: 72191 - protein, 33 aa, Homo sapiens
MFLLNLEGSFCSLSPSVAFSPVRCKASLVDRHC

SEQ ID NO: 72192 - protein, 51 aa, Homo sapiens
MSMCLSFTPPLSAATAAAAAAAAAAARIAAAPSLARRRYLLGQVRSSPEIL

SEQ ID NO: 72193 - protein, 47 aa, Homo sapiens
MSMCLSFTPPLSAATAAAAAAAAAAARIAAAPSLARRRYLLGQKFYE

SEQ ID NO: 72194 - protein, 56 aa, Homo sapiens
MHIFSICCMSSELHKMKSLSLQLASEKRSLVALVEEIVFLLLRVSPCLGPSLSPRL

SEQ ID NO: 72195 - protein, 64 aa, Homo sapiens
LTKFTKRCILLTPLFNPLVACQCLCVYLDRHSFIVIQSIGRVYVSIFWQAYRCLRLMGKNQHEL

SEQ ID NO: 72196 - protein, 41 aa, Homo sapiens
MAENVLRKLMTLLFCGSASETTWKMNCSHQQHAIMSSFRTR

SEQ ID NO: 72197 - protein, 51 aa, Homo sapiens
LARGRIASRSCAALAAAGTPCSALSLGPETSHSPHTPPPQLRFSGGRGEGR

SEQ ID NO: 72198 - protein, 51 aa, Homo sapiens
MSVGRIASRSCAALAAAGTPCSALSLGPETSHSPHTPPPQLRFSGGRGEGR

SEQ ID NO: 72199 - protein, 56 aa, Homo sapiens
LGHSVALAGAGCLGAGLGRARRDGRVLSLAAAAAAEAAAAAGEAALRGQHQNWSVI

SEQ ID NO: 72200 - protein, 51 aa, Homo sapiens
LEKLEGGPLTPESVFPAFPIGPMMPFFLPLSSLGQSGPWGETAKLPGPSSK

SEQ ID NO: 72201 - protein, 116 aa, Homo sapiens
MWGSSWKTKRSPTHAVLGTASALQLMRHFLLGLTHHSYAAQTGSRDSLLFLRAKSSAENRIEIHSTDFFARRQGWRTTSTGSLFCSFLMRPKAIYLELLHNTTLKDIILPIINSVK

SEQ ID NO: 72202 - protein, 48 aa, Homo sapiens
LFYPQLKMDRVLLVISLPPLPPSWMPSRSCLQPCTPQRALKPSPPHFP

SEQ ID NO: 72203 - protein, 52 aa, Homo sapiens
LAERSSLKTLGCWLSHSKSIICSSNKCWSPTLSSCSMLVPFSAITALTVPPL

SEQ ID NO: 72204 - protein, 56 aa, Homo sapiens
MTTFSYACLPFMSSVARGRTNSEDCTNTHRVTPLLWKLTQGERNSDFKQHLFVWPV

SEQ ID NO: 72205 - protein, 28 aa, Homo sapiens
MKCLQILFFSRMSTLESAGLFQVPRVIP

SEQ ID NO: 72206 - protein, 174 aa, Homo sapiens
MADEQRAGFSPCGSLSLTVLGGCFLSCCPWESDSRFFSLWPLGLSGLGGLTRSTRWASLVWGPGTWRSPAASVRPVLGVALKRQPVPQVSSLHTRLIACWFRPSAGFSLPLSNSHTAERAYGRDEAVHSKNILILRITSPPGITGVLKKCCDTSEHREIHGHFQIMEDSRRNFN

SEQ ID NO: 72207 - protein, 97 aa, Homo sapiens
LSLSWRPRETLLRRLRLRVGTALLCGAGPGWQLPALGGEGGLPSGPPPKAVGPAAEARMPSRRRGGSSLIPDVGYLSEVDCPWPEHFPKIILSKISV

SEQ ID NO: 72208 - protein, 61 aa, Homo sapiens [sequence omitted]

SEQ ID NO: 72209 - protein, 48 aa, Homo sapiens
LSCAAAAFFSLSLGLPLHPPCRVTGLVPWAGRNTSMWPQTSESFLLAH

SEQ ID NO: 72210 - protein, 25 aa, Homo sapiens
MTVWVAAFAVNHAQATQRHILGFWD

SEQ ID NO: 72211 - protein, 94 aa, Homo sapiens
LSVMMLGTCGQPVSCAASWAVARPSQPLARLTLAQAEAPFSWTMSSAVGKKVLCCSALISAGMPTTVTTARMPVSCASLHDPARSADHLFFWEL

SEQ ID NO: 72212 - protein, 65 aa, Homo sapiens
MATYSAAFLPVVIGLDRQAAVLNPLGSRSGVRKLLGAAWGLSFLLAFPQVSDLGLRTGQDRDLGP

SEQ ID NO: 72213 - protein, 44 aa, Homo sapiens
MKPRTLAVSATAFKVAPLEFVPSDVRMCSEFLPSGGFVISLAQE

SEQ ID NO: 72214 - protein, 100 aa, Homo sapiens [sequence omitted]

SEQ ID NO: 72215 - protein, 104 aa, Homo sapiens [sequence omitted]

SEQ ID NO: 72216 - protein, 80 aa, Homo sapiens
MVRRFHTLWRVSFLDNSGSCCVARAALELLGSNSPLASASQRAGITGASHPTVCSPEVEPERKMRDCLGATTSTMSPCTG

SEQ ID NO: 72217 - protein, 22 aa, Homo sapiens
MNDRGQGVLSLGLCIPPSLALG

SEQ ID NO: 72218 - protein, 63 aa, Homo sapiens
MCVLAFLTTPLLCISFFHFLFQAFLFLPCGNSFGASDCSSSECAAIPVDPVPGLQLLHLCQLS

SEQ ID NO: 72219 - protein, 106 aa, Homo sapiens
MGGVLFTAFSQLKIVSCETRFVVCGSDLCVRLGLLRLLARPGALGSEAGAGRGGGEGLPATSLPPPDAWLGWRWNRAFGMLGDKGRKHHRKLADSKERKEEEVPLY

SEQ ID NO: 72220 - protein, 132 aa, Homo sapiens
MPRGTQRRPAQAACVRRCGAPWCGVALPLSLPTGRRAPCCQPEARRRLPPSRLRRLAVQGHHTASSSSPAPSGTPRGRATRATARAGIGELTRAEGARLGMLARVLLRRVLDTSDGSFRDPHQPRLTLDTGL

SEQ ID NO: 72221 - protein, 43 aa, Homo sapiens [sequence omitted]

SEQ ID NO: 72222 - protein, 66 aa, Homo sapiens [sequence omitted]

SEQ ID NO: 72223 - protein, 63 aa, Homo sapiens
MELPLRAARPAPRRARSLLCGQVIGLAVLRPQAAAAPQRWSPKSSSSTWEVTSCSPWMALCSP

SEQ ID NO: 72224 - protein, 34 aa, Homo sapiens
MPERRGSGAALIIWASPRRAWGNRETGGGLKASG

SEQ ID NO: 72225 - protein, 48 aa, Homo sapiens
MEWTILSLSQLCHCSVKASIDGTQMHGCSCTPVQLQKADSWLGLAYGP

SEQ ID NO: 72226 - protein, 45 aa, Homo sapiens
MRTRRCACCLRTSQQGWSVSSLRGPSFSSPSRPWRKSGSSPPTLI

SEQ ID NO: 72227 - protein, 206 aa, Homo sapiens
MADEQRAGFSPCGSLSLTVLGGCFLSCCPWESDSRFFSLWPLGLSGLGGLTRSTRWASLVWGPGTWRSPAASVRPVLGVALKRQPVPQVSSLHTRLIACWFRPSAGFSLPLSNSHTAERAYGRDEAVHSKNILILRITSPPGITGVLKKCCDTSEHREIHGHFQIMEDSRTKKTENTTHYPEIETEGVNNREKRGQRKGKQRRRGI

SEQ ID NO: 72228 - protein, 192 aa, Homo sapiens
MADEQRAGFSPCGSLSLTVLGGCFLSCCPWESDSRFFSLWPLGLSGLGGLTRSTRWASLVWGPGTWRSPAASVRPVLGVALKRQPVPQVSSLHTRLIACWFRPSAGFSLPLSNSHTAERAYGRDEAVHSKNILILRITSPPGITGVLKKCCDTSEHREIHGHFQIMEDSRVRRASFSALHCENLVGFLKMKP

SEQ ID NO: 72229 - protein, 117 aa, Homo sapiens
MADEQRAGFSPCGSLSLTVLGGCFLSCCPWESDSRFFSLWPLGLSGLGGLTRSTRWASLVWGPGTWRSPAASVRPVLGVALKRQPVPQKEHTGEMKQSTPRTFSSYGLRVPLGLQEC

SEQ ID NO: 72230 - protein, 66 aa, Homo sapiens
MQVQVTILFLATSCEKTNIWVTLVSTLVLLLVIVASAAIDHTRVVIQKLHIGKDFITSRTMQIDVD

SEQ ID NO: 72231 - protein, 39 aa, Homo sapiens
LKGKELRVCVCMCVCMCVRACVRVCARASVWTRRWGQLS

SEQ ID NO: 72232 - protein, 79 aa, Homo sapiens
MSAAAAAAAVDSGGWCIVLGTGGAEETSAISFCTVIFVLETPERKTGPDAPPGAIPPSPPPQPKAPVAPAFESELRKGG

SEQ ID NO: 72233 - protein, 63 aa, Homo sapiens
MQRGWGVGGWRRPLQSLGTCTSSWALFPSLSQDPWAWRFFTCDHPGAGPALGRQFPGKPLACV

SEQ ID NO: 72234 - protein, 98 aa, Homo sapiens
MTAFALSMLSAHHLLPLPLQWLTLETKTKTPQPFSSTSQISTDKDKGLNPQLLKMDPGHMGWSDTPAQLSAGEEAQKRFRGLKDILLPCPYEQAISAP

SEQ ID NO: 72235 - protein, 53 aa, Homo sapiens
MLQSNFFFGLILLSSHSPIVDPDSNFPPNFCKLSMISESPDLQHYYIHYSPCT

SEQ ID NO: 72236 - protein, 53 aa, Homo sapiens
MWNSIYQWVLPHFFLPGILHPSLLLLSCTGEQTCILDENKPTLETATQDIQKR

SEQ ID NO: 72237 - protein, 80 aa, Homo sapiens
MRALLPLLSAGATACVRDPWPDLSAPDNRKSLFRLKKKKKKKKSLWKTQQNPGSAELGEKSLAGAVSSLWFNGLLEARTG

SEQ ID NO: 72238 - protein, 82 aa, Homo sapiens
MRALLPLLSAGATACVRDPWPDLSAPDNRKSLFRLKKKKKKKKSLWKTQQNPGSAELGEKSLAGAVSSLWFNGLLEARTGIF

SEQ ID NO: 72239 - protein, 121 aa, Homo sapiens
MKRSNILAVMLFLISWMSTSISPLYPSLLVWISRYTTASSCSPSLGAGPAGTPRRSPSTVAAAPQRWPPPLTLRWHTSPYPPESPSTCCLYRQALGSWPLALCLQHCHLHVDWEPHSPRTC

SEQ ID NO: 72240 - protein, 109 aa, Homo sapiens
MQVQVTILFLATSWFPMAPVSRSSNNSGSSSDFKSSNNLKVFQIILSFQKIHIFQTIHVFRTIHVFQEAPSLPVNQVFQQIQSSSNYWSSTKSRSSRKIHVFQEIHVFQ

SEQ ID NO: 72241 - protein, 25 aa, Homo sapiens
IPLLGGGGCVCVCVCVCVLGEASLK

SEQ ID NO: 72242 - protein, 51 aa, Homo sapiens
VQEAATAAAAAAAAVAAAAAAAAAAAAAEAPVAAAASPATTTKKNPHQILT

SEQ ID NO: 72243 - protein, 12 aa, Homo sapiens
ILITDVILCILL

SEQ ID NO: 72244 - protein, 51 aa, Homo sapiens
IQIERKRKKMSRRTSIRRNEENESFKLQSRSVLFRHKIISLILSPFAFASR

SEQ ID NO: 72245 - protein, 52 aa, Homo sapiens
RGPRGTEAVAGFPCPRRMGNSRGAAAWGLKGAASATAMAAGSSRRLQLLLAQ

SEQ ID NO: 72246 - protein, 38 aa, Homo sapiens
ITFPPLCSKKNHFSTSSVIMMKLVLTEWQLWIFNSNSQ

SEQ ID NO: 72247 - protein, 28 aa, Homo sapiens
IWDLGLLIFLTVNLLVVFVGTRGAENGE

SEQ ID NO: 72248 - protein, 9 aa, Homo sapiens
IVYFKLICL

SEQ ID NO: 72249 - protein, 42 aa, Homo sapiens
MYTFRKLSPYLNKIVFVCSSVLGQSWGGFFSNLSETLSANTL

SEQ ID NO: 72250 - protein, 53 aa, Homo sapiens
LHPPLLTLLSVVWVIFPVMHVHLSHQTQVDCRHQKHRVALHTPPPSQTCGVFT

SEQ ID NO: 72251 - protein, 42 aa, Homo sapiens
IMEYKKTTKAMKKRRMFYLHPISKPLLSCYCMSLQAQYRASS

SEQ ID NO: 72252 - protein, 120 aa, Homo sapiens
LGNYLEMRLKSSFLRGLGSWKSNPLRLGGWTILLTLTMGQGEPGGPQGDPWVPHELLLPSLCDSSHASSWGSGSITCAWRGGDSSSHPLVSGHILSNSPVAAVMCSSMGTHLSPFKGTLL

SEQ ID NO: 72253 - protein, 41 aa, Homo sapiens
LSMMRCIPLIKCFSSYAITISCLAPILYSSEAALHCKSISF

SEQ ID NO: 72254 - protein, 81 aa, Homo sapiens
MIFSPSPRLCLFLVPCAHSCSLQSQPGLGIVNSFSFFSYCFLYSPLYFIPSLPYKWFSAQLALVTRGHRKYLLESLATCAF

SEQ ID NO: 72255 - protein, 52 aa, Homo sapiens
LPKHSLSSRKQHGVYLKLPDMKRSLTVKFHFSSASSFTCSLSSALILACLNT

SEQ ID NO: 72256 - protein, 34 aa, Homo sapiens
MWRRSLWTFSRSGSLRRTGRIVLVARAQSGVAWS

SEQ ID NO: 72257 - protein, 48 aa, Homo sapiens
LWGKPARGALAQACLPGVLVVYPSVALESPPAPFHWVSPQTKPLDLSF

SEQ ID NO: 72258 - protein, 36 aa, Homo sapiens
LPCHCAFLGGLAPVLGVGGWVSLSPHFLSSCSACLN

SEQ ID NO: 72259 - protein, 69 aa, Homo sapiens
LRRSTDKLSRAHGLQRVQANLKLLMSILLMLPPGSNEAWAGCPKLLIFILALPQLSQQRIHWSSNQTRE

SEQ ID NO: 72260 - protein, 25 aa, Homo sapiens
MKTIPSPFLLLSEGLEGSRASEEQL

SEQ ID NO: 72261 - protein, 93 aa, Homo sapiens
MMSVLSGAMWSATSRSARPSPAPMAGRRCPRLTAAVSDAKLPPSPACTRAVRWPLESAGLWTPAPAAPAWRAPCVARASAAHRSRVAPTRPLP

SEQ ID NO: 72262 - protein, 48 aa, Homo sapiens
LQGPTSGFPGSGFGPRRRGRKARAPAFPGLSLLGCLWSGQPGSREIQP

SEQ ID NO: 72263 - protein, 31 aa, Homo sapiens
LEADYLLHQSYHWGEIYCLDKFSPIPSKIHL

SEQ ID NO: 72264 - protein, 36 aa, Homo sapiens
MGRGAGRRAKWKGGAPKALYFPCVSLCLWFISGGCA

SEQ ID NO: 72265 - protein, 22 aa, Homo sapiens
MHLALYFPCVSLCLWFISGGCA

SEQ ID NO: 72266 - protein, 116 aa, Homo sapiens
VEGGWLRGNRCSCHKELSLVGKASWKVFRFLYFHALLLVLPSPLPTNPPNARLLLTWVQREEQLGGGQRGTQFMVLGGGRAPRQNREETVEMPWAGVEERESLNGEKQEMESLGEG

SEQ ID NO: 72267 - protein, 51 aa, Homo sapiens
LDCCLIFLTLSYFSPADEAAAEKMEAILVNGSHLSSWQRKKRKDPLVRNGD

SEQ ID NO: 72268 - protein, 58 aa, Homo sapiens
LTSFSCPIQAPVLAALLKLSLAPAPAPQPLAKPLLSFLLPPLSLQLRDGPGSSVSAVL

SEQ ID NO: 72269 - protein, 86 aa, Homo sapiens
MSGGWTSRKGSAGAGAGVRGLGPPTQAISPMLSSQQAERSEAPAPSSWEPAVHTPLTLPTSSFQVVDYRLSSGKLPPDLTGVQEAG

SEQ ID NO: 72270 - protein, 38 aa, Homo sapiens
MARLRALPACFTRAQPPASTENVFWNQHSLQRLHTAFW

SEQ ID NO: 72271 - protein, 125 aa, Homo sapiens [sequence omitted]

SEQ ID NO: 72272 - protein, 38 aa, Homo sapiens
LPCVLLVSLCSLLLGCNSNFPTPCIPSFMLCKVLHFFL

SEQ ID NO: 72273 - protein, 106 aa, Homo sapiens
VVERDKRWSFSVVWFRDFIFNFMRQGLALSPRLECSGMIIAHCSLILLGSSNPPASAFQLAGTTGARHRAWLTFHFFCRDGVSFCCQSWSQTCGLKQSTCLGLPKC

SEQ ID NO: 72274 - protein, 124 aa, Homo sapiens
LLRSPPRSTSISRAARCCALAGASLLGPRIGPHHPGTTPFPGPSAFPPTRPSPTRGACSPRPGAFSPSGGTRSLAPARPSPRRSTESRRPMAQPTASAQKLVRPIRAVCRILQIPESDPSNLRP

SEQ ID NO: 72275 - protein, 62 aa, Homo sapiens
LTRSRGPRRPALLLALPPRAPAPGSSRAGMLLRSRAASGPATCSPGKRTRRGAAGLPGVLPP

SEQ ID NO: 72276 - protein, 97 aa, Homo sapiens
LLAALFAFWPPAGCGGAEQGGGQTQHLLSDLGLARALAPRPPLPRGCQVLALALAYHPALWGQAPLAWLKYSPGRLLCAARLPAGSPPAPHPLWKRM

SEQ ID NO: 72277 - protein, 56 aa, Homo sapiens
LQKPEVQEAATAAAAAAAAVAAAAAAAAAAAAAEAPVAAAASPATTTKKNPHQILT

SEQ ID NO: 72278 - protein, 32 aa, Homo sapiens
VMAAAICLVGINAIFSGGYCSLAVLQNWSMLA

SEQ ID NO: 72279 - protein, 206 aa, Homo sapiens
VGRPSPQAATWWAALPFFPPDPARSASCSSHQSMIQASDSFQFPPRSPPPTTSSPPVPQHSANSEARPLLPLPRTARSVLFSVPGPASFSSASFPTTPIIHEGRRSRACPTSAPENQSISPRPRRMQAAHTSGAPKPPGEEAEGAFCSRVVMGKAEGAREQRAWGGANASASGVRRPGAPGPERINRRLRCRLLPAKHHPPLVSLC

SEQ ID NO: 72280 - protein, 54 aa, Homo sapiens
MSGASSDRGLSCVSAARVLVGRACSSGARASRPDLGPRQGWKMMEEAEVEATEC

SEQ ID NO: 72281 - protein, 99 aa, Homo sapiens
MQHFAATLQASLLSGLQRLERDRDWKGTRTEQTGYKDSKQFHALCCYRGEQNAFSKDLKTLPSLQERIDADRRAWTDVMRTKENRWLEMTFIQGHFVRP

SEQ ID NO: 72282 - protein, 28 aa, Homo sapiens
MPGNSIWITAVAAQGDTQVAAFSDCIIF

SEQ ID NO: 72283 - protein, 37 aa, Homo sapiens
MHRCSLGHGLCAGLSHGHHQYAYGFDDRHSLGISPHW

SEQ ID NO: 72284 - protein, 41 aa, Homo sapiens
MSTVKKMRGLLRSRLLSSLLLKAPLRLVSLFWRLCIRKLKI

SEQ ID NO: 72285 - protein, 24 aa, Homo sapiens
MPPCAAPSPLSLASAWHSSTSSGS

SEQ ID NO: 72286 - protein, 109 aa, Homo sapiens
MSMASTPAATTWATRTCSWSGSASTTTRPLLTSTCLEPFWWTWNPEPWTVSAQGPLDISSGLTISSLVRVGPATTGPRVTTRRGRSWWIRSWMWCGRSVKTATACRASS

SEQ ID NO: 72287 - protein, 52 aa, Homo sapiens
LVPVFAHLSILQSLVPAAGAASPVAISAQHLCYSHVTPGDPGAGAGQGPAPS

SEQ ID NO: 72288 - protein, 36 aa, Homo sapiens
MGMPERRGSGAALIIWASPRRAWGNRETGGGLKASG

SEQ ID NO: 72289 - protein, 63 aa, Homo sapiens
MEFFIPTSVDLKILPLSACLGSAVSSLPWFSDDACNNAMRFAHSWVGGDIGAQVWVSDCVTPC

SEQ ID NO: 72290 - protein, 54 aa, Homo sapiens
MAMFLAGCGGPLLNDLLPCCSEDTAARKGLAHCGASQGTLVAPASDLVLSLVWG

SEQ ID NO: 72291 - protein, 65 aa, Homo sapiens
MSHALALLASTWAPTARPPQSFTQAIADCRCMLEMGHRAGHDMSCLDIGGGFPGMEGSGPKFEEG

SEQ ID NO: 72292 - protein, 109 aa, Homo sapiens
MLPALEHQTPSSSVLRLGLALLAPQACRQPIVGPCDHVLAPLTNECLSSQKINNESSRQRGRKMDLARDGEERTQKDEVVQIGSWIGGRTKGEAAEVDVKDGEKWTAET

SEQ ID NO: 72293 - protein, 30 aa, Homo sapiens
MLPAAALAGFFSEGRAVGRRKKRIYPKIKT

SEQ ID NO: 72294 - protein, 60 aa, Homo sapiens
MTYCRGSLLIHALKSAQGQGLPCSISVWPLLYQPEASRTLWSLPRVTDNLPPPPAAQGSA

SEQ ID NO: 72295 - protein, 27 aa, Homo sapiens
MVFIAASALAEVPRAGSQGARVSQEHH

SEQ ID NO: 72296 - protein, 29 aa, Homo sapiens
MQQLLGVTGFLWVLCEEYAFIPVSGRGEE

SEQ ID NO: 72297 - protein, 52 aa, Homo sapiens
METSCSLWVSSELFCRSVKVFFCLLALHLSALPHSSWTQDKNLGLAGMVELK

SEQ ID NO: 72298 - protein, 64 aa, Homo sapiens
MTCQRPSLRSNCAAAGALSAAAAARAPRAPFGTHRSPPPAAPLSRSRAAAAVSPRRLGDAGHGR

SEQ ID NO: 72299 - protein, 42 aa, Homo sapiens
MFFNQSYTKCPCLSCLPSHFLHVFLSATLRQQDQPLLLSHST

SEQ ID NO: 72300 - protein, 48 aa, Homo sapiens
MPRASAPSLSLAYSLGAPAPPATPGLPKRLLGRPAQRAVRSVCEEPQS

SEQ ID NO: 72301 - protein, 85 aa, Homo sapiens
MVLGCLKTGRQVNGGKRRANLVIHWVCGGGLPGWVVQTSTPESPSPWSSRPPLALAAALVHSPSNMDERVQGDTLMDLLSAEWSQ

SEQ ID NO: 72302 - protein, 22 aa, Homo sapiens
MESRRCGFSCCFFFFFSEALSE

SEQ ID NO: 72303 - protein, 52 aa, Homo sapiens
MGNPKAPSRVSLAPWGCAVARQTMLLAAGGLQAQVMESDCPGSNFRLCLVVG

SEQ ID NO: 72304 - protein, 155 aa, Homo sapiens
MKNREKFFFALTLSGSQKLLKGSLKVLVIRLRDSLIKMGEELSQAATSESQQRESSQYYQRRLEELKADMEELVQREAEASRRCMELVVKLRLREVLCPRSQGSWRRGNVRKGESQEWKEAEIRLPTLVGKKPVAVPAKSNPNLPETQRRLHSRI

SEQ ID NO: 72305 - protein, 51 aa, Homo sapiens
MPVFASLLVVSCFYQISGHYPTNTIKMFEQLDFKHFRFVEWCSPSGTALSK

SEQ ID NO: 72306 - protein, 45 aa, Homo sapiens
MWNCSLSVIIFLSCIIQQATVLSRRESEELSGKLQVTLRQSSQMH

SEQ ID NO: 72307 - protein, 26 aa, Homo sapiens
MVFLTWLSCISLTLTKLVQHLPWATC

SEQ ID NO: 72308 - protein, 36 aa, Homo sapiens
MEVLFDSLLFSSFIFPSQSLLSRTSAFSHKPNGLSE

SEQ ID NO: 72309 - protein, 17 aa, Homo sapiens
INTLFGLASFSCMQLDD

SEQ ID NO: 72310 - protein, 161 aa, Homo sapiens
MSSHLPFYVTCARWLLCLQTSHLHSRQKGEGKSKRCVPNKSILKTNKGRGSRRKFKKKKKKNKNRKAVVSLKAPSSRLLPVTHYPVMWPPLDSRQSEEVSVSKRHMDATDKIKFPWLKEKRTIEFGEAAGYVCHRRYKDMEPHEKMGEAAKKVHWVQVRSR

SEQ ID NO: 72311 - protein, 55 aa, Homo sapiens
MVFPAKPEAPSLLPLFSLVSFSGWPEDETPQTPHFLALVPGLAGPGIHLHCVGCP

SEQ ID NO: 72312 - protein, 66 aa, Homo sapiens
MSAAGLSSPCPTFLFSSLVSPTLLLPQAVPDAEFRLSRLFLVPGKAERRSSNGLVLRASGENQRSN

SEQ ID NO: 72313 - protein, 33 aa, Homo sapiens
MAHRSLGLLGSSDLSTSASSIAGTTGTHHHPQG

SEQ ID NO: 72314 - protein, 26 aa, Homo sapiens
MAKIPNLLFCFISPLGVVRRSSPCYP

SEQ ID NO: 72315 - protein, 22 aa, Homo sapiens
RALTAILWKPPSSLAQASVVAP

SEQ ID NO: 72316 - protein, 110 aa, Homo sapiens
LRLGLSLILRSARERSSAAAGRKQFCKNNHTQPGNCLPLGLSLSRRPHSLQGGGHRIYRGKTSLPASRLQCCKLRISLDFVFPGNCSKTQNHICREPDCHGIRGAGHSYL

SEQ ID NO: 72317 - protein, 62 aa, Homo sapiens
LAGWLSAALRCAPAAPAARGWGCPAEPRDPPPSARTRTDKLILKVAVVLLLSKNGGPTGESG

SEQ ID NO: 72318 - protein, 87 aa, Homo sapiens
LGVSPGAALLTVLPVPAVARRSAGPAATLATDAGRAATPGSWPPRRLRPPWPSGPQAPPRHPPRTASSARGSPAPCSPSSSWPGSCA

SEQ ID NO: 72319 - protein, 63 aa, Homo sapiens
MSYLPTNPPGSILTCWLGVSLGSHRSARGGSTIYGRLLPRRKDVWFSQAKDVPKYRGLLYLQS

SEQ ID NO: 72320 - protein, 50 aa, Homo sapiens [sequence omitted]

SEQ ID NO: 72321 - protein, 62 aa, Homo sapiens
LPLSALLLLGLRGPGPRQQRPWGLGPLCRPRPPAAPGTRPGARSWGSRDVYLSKRDHSSCSR

SEQ ID NO: 72322 - protein, 47 aa, Homo sapiens
MSVAIFLPFSVPLRRKNLTENTKKKKKKKKKKSSYHCLFCELFVLVC

SEQ ID NO: 72323 - protein, 46 aa, Homo sapiens
LLPRVLSHLAAAAPVQTLTLPPKAQPSPNNPQPCTDVGCESLCLSD

SEQ ID NO: 72324 - protein, 66 aa, Homo sapiens
VAYTQSFPPFLIGFLQALPTPALCRAWEVNQLGGFLEKKSADLRETALFVKYKIHLVGVRDAFVDG

SEQ ID NO: 72325 - protein, 50 aa, Homo sapiens
LRARRAVLTAPRTLVSSLFSPRPSLGRAGTLAFPVPHGAAPTPDGSFSHT

SEQ ID NO: 72326 - protein, 68 aa, Homo sapiens
VCACARVCVLGVCVLGVCRGAERRAGPRGRKEAVELPGLGLRLPSSALLPRRRRCCSRCLWPIANGWF

SEQ ID NO: 72327 - protein, 43 aa, Homo sapiens
LRGAGGGAGWGQRWLRLLALGSACGRALAQSRLIAAVAPGATG

SEQ ID NO: 72328 - protein, 134 aa, Homo sapiens
VTGRLGAALLNCVQFCYTVHCPLLGVCMYEHTCLSERFLGVCPLALISPIPVPTLPEFFYPRSCQPHWESVCSNGLSCLCRGDLELCTCHYWGGVPALASTMRRPLYLSSQSLLFLKHYYLFFRCLPAAVLLST

SEQ ID NO: 72329 - protein, 101 aa, Homo sapiens
LQGGLGDCSPARPSPGFWARASLAVGAGAVGGTLLNWEIASDLQTPNISAHPALGFKRDPSPRLALPCENVGASCFHHRLPHHLCSLAVHCHRRQCLVGRR

SEQ ID NO: 72330 - protein, 124 aa, Homo sapiens
LSFLTPSQSCGKGHSLSLSFLSCQPLRACSSGSESQWERARFAKPWAPGLGAPLPDPSGHGRGEPRGEEPRGGARARGRRQAALAPSRDALSFFLLFLLLPLFASPANAVGAARRSGAARDRAT

SEQ ID NO: 72331 - protein, 46 aa, Homo sapiens
VRGAASLAAAAAAVAGADARSSPETPGGRSRGAAAERAPRGVWRGE

SEQ ID NO: 72332 - protein, 80 aa, Homo sapiens
LRPSRAESTRHSRTSEASRPRGTPPRRPPAGPRPLFPLVAATGALQGAAPACSAPDLSAKGSLCQRDFIHTDEPRIGIAV

SEQ ID NO: 72333 - protein, 47 aa, Homo sapiens
VTWTRKWSSSRHRWELGARLGVRPAGGGGLASAATEGSGVVVWVGGR

SEQ ID NO: 72334 - protein, 39 aa, Homo sapiens
LLLMLPCGTCHGAGTAALSRPAVVAAAAAAAGPERRSCH

SEQ ID NO: 72335 - protein, 41 aa, Homo sapiens
LLLMLPCGTCHGAGTAALSRPAVVAAAAAAAGPERRKYGIM

SEQ ID NO: 72336 - protein, 30 aa, Homo sapiens
MEALRASTACGLSAAAVCGMSTIQHGGGGR

SEQ ID NO: 72337 - protein, 55 aa, Homo sapiens
LTDQSRWSWRRGRQAADSANIICPRLKNSSSPIAGGATAAAGAGLLCGGSSPGHG

SEQ ID NO: 72338 - protein, 31 aa, Homo sapiens
VSRLSPRRSLLPVLPPLCSVLVSAFIPEWIW

SEQ ID NO: 72339 - protein, 42 aa, Homo sapiens
LARLPGSRALAGWVLGPGAPAPALTARLCAAGAAQPCCAACW

SEQ ID NO: 72340 - protein, 58 aa, Homo sapiens
VPSRREKGRSLCGVCCVHICFVPHTCSSCLGAYQVPSPVLGAGSTAVSKGDNIPCSQR

SEQ ID NO: 72341 - protein, 113 aa, Homo sapiens
VLLACSSSPPALPLRDLPTPCSPRPHLLQHPGIPAPPARAAPAGSGTCCARREEGKLQTPAWKTGCRGCTTSRRRRRRNYFAIPHSAGALPLPLLLPPIRVRGFEHRSGGDAL

SEQ ID NO: 72342 - protein, 133 aa, Homo sapiens
LGPVCATGVGCPASGLLLLLVLLRRPAASPSRAGGESGCGFVLTVIVAFPRLGGLRAGLLLLRERAVLSDPTPSRGSPHTLGCVRVEWDPRTRVSLDSYGAERTKIPDGKLNEWQKPWWSRRKSPKRSNFGYY

SEQ ID NO: 72343 - protein, 39 aa, Homo sapiens [sequence omitted]

SEQ ID NO: 72344 - protein, 54 aa, Homo sapiens
MEADLTSPPRWAGSAAGALPLLRVPLLAALETGWTAWVGLRICSAPCGDRCQGK

SEQ ID NO: 72345 - protein, 44 aa, Homo sapiens
LAKLALCAGAPGLLRLSSSRPDFTPGSATGAWLPPNPIVQRRHP

SEQ ID NO: 72346 - protein, 33 aa, Homo sapiens
MRAARALGGAPGASRAACTGGLALLRPGRAWWI

SEQ ID NO: 72347 - protein, 46 aa, Homo sapiens
LQGSGNRSGNANRSAARRLGCRLSAAALGWCAVVRPRLTAASATQM

SEQ ID NO: 72348 - protein, 79 aa, Homo sapiens
LPSPSLPLLILSRSAALQCDESESSSHPARAFLLLPALFYFSFGRRRHCCTQLVSVPRFYPQVVPAAYGPGRLGYFCSR

SEQ ID NO: 72349 - protein, 78 aa, Homo sapiens
LPGGERWPCANAARQHPSAGKLQYLSDLWEVVQPGHRFHLPLAEEDHGQDDSEHAGAGRGRYRGGDQHDQHSLAERCL

SEQ ID NO: 72350 - protein, 29 aa, Homo sapiens
MRKERTPGTPGWALLLPSGFRGPSPWQCL

SEQ ID NO: 72351 - protein, 77 aa, Homo sapiens
VRARRCGFFSGLRRALLLVPALAGTRFLFASFPSARRRPAAKTRWAAPPIEITEDIRVLLKRKRGHLRTLLSASKDY

SEQ ID NO: 72352 - protein, 71 aa, Homo sapiens
VRARRCGFFSGLRRALLLVPALAGTRFLFASFPSARRRPAAKTRWAAPPIEITEDIRVLLKRKRGHFSFLS

SEQ ID NO: 72353 - protein, 138 aa, Homo sapiens
MAVCDILGAAPPLAGSPAALARGPPARLGGEGPGAGDRRREGPDRSPRQPPVSQRLRPSRTPAPRRRRALHPPSGRDREEEEEMGYARPGPPRVRACARGGRGGAREDFGARRKHVRGLGALAVCAEVGRAAGGGVGG

SEQ ID NO: 72354 - protein, 117 aa, Homo sapiens
VSVPFHFHFCSLACVLPSARGKTYPEDFFRRGWGGAAGEPWPKRTMLGTVCVPSAAGHQKATWVPGALPLAVGPPPPLSGFPRNVQPRRPSQSLGRVMSAGPDRRPLGTLCCFVSFL

SEQ ID NO: 72355 - protein, 96 aa, Homo sapiens [sequence omitted]

SEQ ID NO: 72356 - protein, 69 aa, Homo sapiens
VMCVLAFLTTPLLCISFFHFLFQAFLFLPCGNSFGASDCSSSECAAIPVDPVPGACSKFSSVRPFAGLV

SEQ ID NO: 72357 - protein, 61 aa, Homo sapiens
MRFLACTRPFRSFSRRSYPGTASTLHLRTAFGSGELVPGVRLLSAFKAPAVSLHCSGNSSL

SEQ ID NO: 72358 - protein, 95 aa, Homo sapiens
LLYKKLSLNLKHNLEGRCLLLKALLIHLTQVLSQQSHVPYEHRGFISFSYTTDPNMPGAMGTPALGEADVVIPRNSCHSGPDGRQEGLPCTAFLG

SEQ ID NO: 72359 - protein, 41 aa, Homo sapiens
VSSRPSKGLDRLFSLLLPVGLFLKRMAELPTCSNTIRTKVA

SEQ ID NO: 72360 - protein, 113 aa, Homo sapiens
MLWAAPWPAPALAPALPPPSDPVLPPFLTGTRSTRNPGPGLLSQQPGGQGRASSRTPSSHWPLCRRADSSSGVGSCSFMMASSFRPQCLGEACTVLIGRDTRFCKKLKNKKRA

SEQ ID NO: 72361 - protein, 52 aa, Homo sapiens
MLSAPCLFISSGHAQPCCSAWRRCHACSLSVSQPRRAIHCDVGRPGWTPSAE

SEQ ID NO: 72362 - protein, 43 aa, Homo sapiens
MRRRRSAVGSVSARGCGGAGGSSLSGFSLGGGGGGSVDASSAS

SEQ ID NO: 72363 - protein, 31 aa, Homo sapiens
MLEAGTCATMACLAVVGGDVGDCSLATVVET

SEQ ID NO: 72364 - protein, 103 aa, Homo sapiens
LLPRKRAGTAPAPPPPAQRAVAAAAAAAAAAAAAAAAGTTARGEGHALSERERALRRNSAPAVRPPQRRPREPRPPSFGHRDPGDTWARNLNGGFPGLTPFIL

SEQ ID NO: 72365 - protein, 29 aa, Homo sapiens
MEIDLENKVSTRCFVVSVFLLFTLPESVL

SEQ ID NO: 72366 - protein, 250 aa, Homo sapiens
LGLRPLHQLLSTLASGPGAGGPWAPAHWPACPPLPGLPRLQLPPPHHAQPCPDGVRLPDPGQCQGHPQAPEAAGVAGSGEVAPGGGPVATAAGARPERLSGPQVPCLPSFAPAVLLPRMPMPWLPGPPGPAAGPLRRGCRGTAFPLPWTARCPGLRPQIPLPQRRGAVTPTPASPKPPWGPFRPPYSIFQTPGDHRPSQWLQGLPQRSPKMDTQPQRQQEKHMGIFFLYFNLIPLKCLFFIVFFIIYIIY

SEQ ID NO: 72367 - protein, 61 aa, Homo sapiens
LRARNPGRSASGKRGAVAGAAHVSNSLLLFAHIPNFLTSIPAGRHGVFGRQQQDDGRPGRR

SEQ ID NO: 72368 - protein, 99 aa, Homo sapiens
MTGWSLLFKFQIDIPDKRCLSPCLSSDLHSTVPGKVEPPASPCPGGWKCKRKVSARSFFSESSLLGLQMAACSWHSLFSTHAQSYGGPSNHLLQPLETS

SEQ ID NO: 72369 - protein, 53 aa, Homo sapiens
LLSLITLLSFLPPQANPNISLQCVDFYPVNTVISLNDVQADETRSLGSLLHFL

SEQ ID NO: 72370 - protein, 30 aa, Homo sapiens
LGAEGSLGLWAAAAAHSALAALCGDRRPQT

SEQ ID NO: 72371 - protein, 116 aa, Homo sapiens
VGPSPTSRFFLLPSCCFGLATPSPLVPLEACPALILPMPSTARRLAPISTLGRGQVGQGWTSRRGVRLCSLPPASTERSHGFRYLPPVLFLLQPQFHQVSGLHGGLGQAEESGQGP

SEQ ID NO: 72372 - protein, 50 aa, Homo sapiens
MCTSGSRPASYLYSICIPQMERFGEALFHTFVKVYMLAQSLVSVPLSLVL

SEQ ID NO: 72373 - protein, 27 aa, Homo sapiens
MSRISPQSKCCVVCLHFVTAGPSILEL

SEQ ID NO: 72374 - protein, 42 aa, Homo sapiens
MTLPFPGHPGSLWRRSHRCSLMSSLWSQLVPVAARRQKAVSE

SEQ ID NO: 72375 - protein, 76 aa, Homo sapiens
MHKKGSPILGSHTARVAGTSPPALPLLAQLPDASAEPHGPRHALRRPQQSPAPAGGAAAPAPGGRQPARSRSVRGH

SEQ ID NO: 72376 - protein, 54 aa, Homo sapiens
LAPAFGESGVWRLVVVISSDCFAVHGFSFCPVGLSAVCASLCPPPLPPAHLCLR

SEQ ID NO: 72377 - protein, 73 aa, Homo sapiens
LRSLLRSPSLPLSLSLLHALQPFKMLPLPCDSPDAAPRPPARSPAPSLARFLSLALPLPTPICYTETPVNGLH

SEQ ID NO: 72378 - protein, 22 aa, Homo sapiens
VCVCVCVCVCVCVCVSLCLCIG

SEQ ID NO: 72379 - protein, 31 aa, Homo sapiens
LRPPRTWGLMGKVLAGAGEFCGACGTAAVAP

SEQ ID NO: 72380 - protein, 82 aa, Homo sapiens
MPAAVMSPRRRWLFGGSEERLLLLLLLLVAPLQNEPRRQSPFCQLRGGARFGSAVLMARIYRSWREDKLSSGCLRCIAVLEY

SEQ ID NO: 72381 - protein, 29 aa, Homo sapiens
MCILSGNKIISLSAPASSPVLCSQDSIIQ

SEQ ID NO: 72382 - protein, 124 aa, Homo sapiens
LRAGSPAPGRERGGRHRHRPGVRRRSCGRAGGHQLGQGLLGAALCGAAAARRGAGFSQAPRGRVANGAAAGAERDRFAVAVAAACVPGAGGSAASLAAHRAPRFPLSRAGGFSEFSGGETDWSG

SEQ ID NO: 72383 - protein, 69 aa, Homo sapiens
LPSAAGRVGSPWFRPAPPSWSPFSRWAGLSGGDCLPGLAIGLLMMFDPAAGIAGNVISKLGSASVSSLV

SEQ ID NO: 72384 - protein, 120 aa, Homo sapiens
MAVSAFWSFLLPCEEGACFFFAFCHDCHVNRTPGTVQGPPVWPHAVTLSKGVTTEVHGKAERCDVLEDAGGKHAQRTGAITRLRAAAENLAWATVVSSVEGAEEHGHRLLLPAGTGMEGD

SEQ ID NO: 72385 - protein, 131 aa, Homo sapiens
LLCARLTELEGVATFRLMEAGERMEPGSLEPGTLPRCGWWWPQTSRRAAGSGSFFCRAGGLGEGRGNATCWRLEPVPPWLTSLWLVAARLAVVGGDVGDCSSATVVEMCWAFAVLGTCSHLLSSLESTALE

SEQ ID NO: 72386 - protein, 113 aa, Homo sapiens
LRRRLHQALVLGLHPGSCAQTAEGKDVTSEMRFRKVWAPVLAALSHSLMSLLDESSCQAVGRPVEKLARNWWGPFPPIASKELNPASVHLSELRGGPQPQLSLRMRSQPWSMV

SEQ ID NO: 72387 - protein, 41 aa, Homo sapiens
MFVCVCVCVCVCVCVWACIYRLWYTCVSGHVDTCVLVGMSG

SEQ ID NO: 72388 - protein, 83 aa, Homo sapiens
LGRPCFSPDGPREGYQRPWCCHLPLLKCLPGAPGAVLANAGNIHFPAASWVLLSYLCLFSGGLGTISGDLGCADSKDPLWQEP

SEQ ID NO: 72389 - protein, 30 aa, Homo sapiens
LSVWPPVLCSLCSVVTFPLPLGAGSRATIP

SEQ ID NO: 72390 - protein, 36 aa, Homo sapiens
MFLPCSSRPAARHAVGAIATVASCRASGTLGHVWSN

SEQ ID NO: 72391 - protein, 137 aa, Homo sapiens
LAWVNSSVTLALLGGDARPLAWVNSSVTLALLGGNAHPLPWVNSSVTLALLGGDARPLAWVNSWMTSALLGECAVPALPPPTSGAEARPGHPSAWTPLEGEGASLSRWAPLALPSLSLHTGVGWRRPQASYCKSFLF

SEQ ID NO: 72392 - protein, 77 aa, Homo sapiens
MGMRLGGRILSSLPPHSGVWLQPSLAPAGGREGAGSPSGLQGQVQGSPRMGFPGGGGWGGVLFLVPRGGAAPSHFIQ

SEQ ID NO: 72393 - protein, 24 aa, Homo sapiens
LCLLLIASLWVEERVIWCRIGGPM

SEQ ID NO: 72394 - protein, 56 aa, Homo sapiens
MSSATLVKASCLLHSTFLFKSWTSLRMSTSGRKEATGAEGGEDKIWSKILKEATRS

SEQ ID NO: 72395 - protein, 126 aa, Homo sapiens
MLCFCGAMGVGAGAAQRWAGVGGSGPVAAVCPEAVRRLTPPLKLATEQGLFSLHYSHDPLGPQRISWKSPLTLDELFGSLRPSLKRMTETLWATRCVSALGELSSLTISATSSSRNWGRVGSAMWT

SEQ ID NO: 72396 - protein, 212 aa, Homo sapiens
LRGSRGRQRGQRRRTCPTWRRGLGRLCASAPASPASAFSPPASLLPSREPPPLGPPPVLPAAAGPGARPSLPAAPRAGRVAEPRLPDGTGPARLGAPPGPRRGHGRTGPGAAAASAGPVAPARRPGAGPRALHAAPPGGRGHEPRSCAHPGTRDPCRAPRRRLGARPGACPGVPRGRRQLLGHGRQPAGGLWPRLLPGDADRDPPAEATDSR

SEQ ID NO: 72397 - protein, 118 aa, Homo sapiens
MEKAKLFLPTCSLPCLFASCCIWPLKGKVKGKRRLRGRTVCELGLTVFPRLKYSVVISVHCNFCLLSSSNPLASASQVAGTDYRHEPPHLANFFCIFVEKTVSPCCTELLLKSLFTSW

SEQ ID NO: 72398 - protein, 60 aa, Homo sapiens
VIFFFSRKANGWRGSTTRFHSSNLCLALFLYLATRDQHAVMCAEGGIGQLHNLDLTTVWI

SEQ ID NO: 72399 - protein, 62 aa, Homo sapiens
LFSLCLQCGFLPQCCRLSECYQSVRDHCLVGWRSRTCSHGSGSNHKTVIYLPNLFLSVASPA

SEQ ID NO: 72400 - protein, 51 aa, Homo sapiens
MLVSLRAASWSLHHCSSLISKPSAAFKIRSLCSHPVKFVNNLIKWHQHFNQ

SEQ ID NO: 72401 - protein, 92 aa, Homo sapiens
LHVLSVVGAWSLALWAQRGPLSCLLGPMEGASWPRPPLPEEEQGSGFPFFFLFWVYSRGQVGRGKVRASGGAIMWHWILSNKFAVVCTRCCL

SEQ ID NO: 72402 - protein, 26 aa, Homo sapiens
MPLSNPPVCTLQILPFGPAVATAWPL

SEQ ID NO: 72403 - protein, 42 aa, Homo sapiens
VLEVTGAAATAAAAAVAALSAVAAEAAARPRAAQRTITGLGT

SEQ ID NO: 72404 - protein, 46 aa, Homo sapiens
LPLRPAAAIQACLSLSLSFMPLSPPHLGTASSKNSCYDTEFNQESA

SEQ ID NO: 72405 - protein, 33 aa, Homo sapiens
LHLTLSFLWAPLVLRGSSKKELEMLKRQTLHLP

SEQ ID NO: 72406 - protein, 109 aa, Homo sapiens
MRSKPVSASSTWRSTLTISTSPGQSAPAWWMAKSCALVNTRQSCATGGRKCGSTSMLGNKHRSPLPLLVLCTLEPSPWLGCPPLTCPRSTQACLAAQSLGCLLSRALTV

SEQ ID NO: 72407 - protein, 109 aa, Homo sapiens
LLLMPVLREDTELHLFWDLLWGRMVDSGILETCLGPPRVKATQHSRRAPEVWKLRRVIGITPTVDRGRQGVRINCLRVGESEMWGPYSAPRPGTVFLSSFLSPASEEHL

SEQ ID NO: 72408 - protein, 102 aa, Homo sapiens
LSVRPALCVLGPYLSMLLAGGPARCLLHTHHLREAPAGRRPVLPAAALHCPLHAHLPGPPGGLAALCVSRLSLLVPTAVGPPALHLFTAGRQGPGRWGSPAQ

SEQ ID NO: 72409 - protein, 201 aa, Homo sapiens
VPPQRPSAALCPSLGPAPALAAPLPNETGRDDQEDVPERLGAEYPGQELLSHGHPRLVQGGQDGHRVALPHRPLRGRLHAYHRGLPPQVLLHPRRGLPARHPRHVRQPPVPRHAAPLHPHRSSTPSLASRTKPRRTWTCPWSSAATRVTATSTARWTSARSSSWWATTPSAAPTSRSRPRRTAAWTRCSARSSPWPSCPAR

SEQ ID NO: 72410 - protein, 53 aa, Homo sapiens
LELQVPWVPEVPQVPLERMEMMGKLENLVVLVSVGLLGLRVLEDCPEQLASLE

SEQ ID NO: 72411 - protein, 45 aa, Homo sapiens
LLLLLFLVFCFSVPTQHIVYDSVYTYYLVIMKKLILRTLKCYTQC

SEQ ID NO: 72412 - protein, 35 aa, Homo sapiens
LSPTSCPADLLVTPLLAAHAAGTGAAEKGAPSSGK

SEQ ID NO: 72413 - protein, 62 aa, Homo sapiens
MPWRSWRPGWPACAGAWAPSRSTSSSAAAACPRSPALGQGSTPRASVSETSCSSTPAGSGQR

SEQ ID NO: 72414 - protein, 60 aa, Homo sapiens
LSGRQLMDLGSTPLRTQGTARGREGEGCRREELMLHTWMVIRLLWKYKKQFLFLILWILT

SEQ ID NO: 72415 - protein, 46 aa, Homo sapiens
LKRLGLSLLVHASSASGQQVYKGGKRLLLDFFFSFFYKSKHLKMET

SEQ ID NO: 72416 - protein, 33 aa, Homo sapiens
VAEPRRGHLKAALASLGGAAPAAATNGSPPLFK

SEQ ID NO: 72417 - protein, 102 aa, Homo sapiens
VPLSQTCPTHMWERSLSLVLGVPGFRRLLRTAVGVRCGVVLSVTAGSPVYTGSGSYGALSCHLIGPGVQWCPLGGAQGPMRQCCPVRTYHRLVSLRALHLPT

SEQ ID NO: 72418 - protein, 86 aa, Homo sapiens
IGAGDAEQVAAAGQLGRQLGASGTVSRCFGHQPLPARPAPFSGLRALPAGLCAASGAAAALGAPLGAGGDREARVKGATGTLARYG

SEQ ID NO: 72419 - protein, 42 aa, Homo sapiens
VGAIAASASAASAVASSARAVRCCAGRARRGRRGRHGARLGD

SEQ ID NO: 72420 - protein, 66 aa, Homo sapiens
LQLPSAPGFWLLMLQTIKYWSIELKNRLKPGWSAVMRSWLIATSASWVKGILMPQSPTELGLQVFI

SEQ ID NO: 72421 - protein, 70 aa, Homo sapiens
MFPARRRAAVTRLSERLSLCFCLHSRLQDPAARPRPEQMEMGCHVVSCPMGKRLTCEELREASRKQPVKN

SEQ ID NO: 72422 - protein, 40 aa, Homo sapiens
MTPEILGLLGFIPSEPGLAFLGCKLRAGSRSAEPRFSHLP

SEQ ID NO: 72423 - protein, 27 aa, Homo sapiens
MVCVFLFCFSPPAGAVCGVGWGVRYVG

SEQ ID NO: 72424 - protein, 76 aa, Homo sapiens
MAVSPALFLSPVPCEESACFAFTFGHDCKFPEAFSACRAIILSPQLDNAQTANLLVLTAASKLEVFLSLTLHSCLV

SEQ ID NO: 72425 - protein, 211 aa, Homo sapiens [sequence omitted]

SEQ ID NO: 72426 - protein, 36 aa, Homo sapiens
MKLSSSVEQVLKVPNRWKRLSLWKLCRIQTSILSHL

SEQ ID NO: 72427 - protein, 27 aa, Homo sapiens
MTSILLQLPLPLSGSCLAVWCHELGVQ

SEQ ID NO: 72428 - protein, 37 aa, Homo sapiens
ISARVCPLFSSLLVAKCSWNQFDTGELRLKPRRNNHF

SEQ ID NO: 72429 - protein, 46 aa, Homo sapiens
KPVAGGRAGPTKMAAAPAAGAIWATAAAKAAAGPTGGLHGGSRGWP

SEQ ID NO: 72430 - protein, 38 aa, Homo sapiens
KGKELRVCVCMCVCMCVRACVRVCARASVWTRRWGQLS

SEQ ID NO: 72431 - protein, 34 aa, Homo sapiens
LKMVIMKRWLPWRPKSVIKLSIILATSICHGTSF

SEQ ID NO: 72432 - protein, 47 aa, Homo sapiens
LAAPRLPARRHLVLGFHCSRWAGRFSVIAAGGGGGVTSGQPRNPTIL

SEQ ID NO: 72433 - protein, 74 aa, Homo sapiens
IASQSRGAASVCCFFPGALVPSAFAAAAAAALGIRMASGAPGPSGLRERRLRPLLRRRLPAAASSTPSPPASRR

SEQ ID NO: 72434 - protein, 28 aa, Homo sapiens
TQLREGFVLSSVLWCRASSSPAQPRRLN

SEQ ID NO: 72435 - protein, 32 aa, Homo sapiens
VAGAWAAGCLTSLPLAHSDLCSDPAASLFLGV

SEQ ID NO: 72436 - protein, 31 aa, Homo sapiens
VAGAWAAGCLTSLPLAHSDLCSDPASLFLGV

SEQ ID NO: 72437 - protein, 65 aa, Homo sapiens
VVGVCVCVCVCVCVCVWLWVSCAVLLEHRGKAVDAGSQLAETCRPWSLMIVPVPLWRSLTAWRCW

SEQ ID NO: 72438 - protein, 87 aa, Homo sapiens
MSLLLLPPPSLPPSGVSSRLSLPVSSLWRKSVPPLPLYSGGGCGGGAGGCGGGGGSGARAVPVRVSRRAPWVVHLQIAERRPRDRWR

SEQ ID NO: 72439 - protein, 31 aa, Homo sapiens
TRPLSSPLASLAVSAFRSLAEAEARERSKED

SEQ ID NO: 72440 - protein, 28 aa, Homo sapiens
MCMVNLALWPRLGLARQLLLALLIPGRI

SEQ ID NO: 72441 - protein, 33 aa, Homo sapiens
RPAAVAPASAGAAAAEAAAEAAATAAPPPADLD

SEQ ID NO: 72442 - protein, 49 aa, Homo sapiens
KEKLQSQIKSPVVFFSYYRKQLPHISQIVLKLPSPENVGRQLSLHRSVK

SEQ ID NO: 72443 - protein, 32 aa, Homo sapiens
KWKSMCLFAETVNAFLALTAVKISGAMTIKTT

SEQ ID NO: 72444 - protein, 36 aa, Homo sapiens
MMRTLRCVTMTMMGCFPSLESVTWGKQGGPGKRMKN

SEQ ID NO: 72445 - protein, 30 aa, Homo sapiens
KMAAVSVWGISAVRPGAPGSRLSFLPDSFY

SEQ ID NO: 72446 - protein, 47 aa, Homo sapiens
LSPAPFSSLSLPLSFAPKSASQPRRVVTEPLRLFLARVLRPRLPRHE

SEQ ID NO: 72447 - protein, 35 aa, Homo sapiens
LTIHRRKRRRRRRRRPSGGTQQALLPAPAVAASES

SEQ ID NO: 72448 - protein, 27 aa, Homo sapiens
MKEQCGRSVLWMTTSAWPLQASPPMQG

SEQ ID NO: 72449 - protein, 72 aa, Homo sapiens
MTPSSVGSVTGSSSAPSPGQAPGSPQGLWCWPGCRPWAGMGRCWRCRSWRSGCPGPQLACSSCCACASMMAS

SEQ ID NO: 72450 - protein, 62 aa, Homo sapiens
MPSPALGPAPLGTSRACVPSTLTATGWWSWAPGASGAPSICSTSSSAATSWAASRREPSTTS

SEQ ID NO: 72451 - protein, 38 aa, Homo sapiens
MRFRVSSGLSGSSPNIRISAGLAVTLSPSGLTGSEGHA

SEQ ID NO: 72452 - protein, 100 aa, Homo sapiens
VRLLCASSMWAPLCSCQSRVSSMEAPSVGSMRSTACPVPTRTIRGRPWKASSSSLVWSPLQVTMNSECVDGWVDGGWQVGRLQGHSWQRLWVCRGPQVPL

SEQ ID NO: 72453 - protein, 25 aa, Homo sapiens
MARSQLTTTSAFFFLLFLKLVVKSR

SEQ ID NO: 72454 - protein, 37 aa, Homo sapiens
VKTRMKTSMMSHLHLMTVSHWPATCSSLCLPDYNNSM

SEQ ID NO: 72455 - protein, 43 aa, Homo sapiens
KKMKGLFLLTTNVSVPGLLPGSSVLPKILMRTLWRETSELLFL

SEQ ID NO: 72456 - protein, 44 aa, Homo sapiens
VKLFLGTMWASMSRMCLSRMFVVATLLVTAKMTHQWKQLASLLR

SEQ ID NO: 72457 - protein, 45 aa, Homo sapiens
RSLMSRMKMKCLMPLCCHPRSTEQAGCWTFYIPRGKGAMWSSWRA

SEQ ID NO: 72458 - protein, 38 aa, Homo sapiens
LMALQGLNIKAFVLKGLVYSLRNIVMSFNVLRVDQGLL

SEQ ID NO: 72459 - protein, 55 aa, Homo sapiens
LIIVMVAGAAAAAAAQPSVRCCSLRGVLQRTSPIYFCSRLGLSMCLLPPARGFDI

SEQ ID NO: 72460 - protein, 66 aa, Homo sapiens
LLLSPGSCFLICISSGAGQVTTGGGMPEAARTGREGAPWIYSVNLLEGCWQFFLFVHHPALFNNCT

SEQ ID NO: 72461 - protein, 44 aa, Homo sapiens
LLGKRPSLWSFVTAALADECRPHFPPPWCHCLWTACQPHRTSYP

SEQ ID NO: 72462 - protein, 35 aa, Homo sapiens
MQAALPTAMVPLSVDSMPASSHELSLKMLKLAGCS

SEQ ID NO: 72463 - protein, 35 aa, Homo sapiens
LALFASTLGTGVWVTGARALPSPPGRCMGNCPRRK

SEQ ID NO: 72464 - protein, 42 aa, Homo sapiens
MINIFCTCLIFFLKTLLQKGKDCLERMHIFSLFISVVTAFAV

SEQ ID NO: 72465 - protein, 33 aa, Homo sapiens
MQKIRGFTVLTRLILNFWAQSVHLPRPPKVLRL

SEQ ID NO: 72466 - protein, 59 aa, Homo sapiens
VFPLKIRTTVLAGESHKRTRDLFKSLLLSLLTGIHRTLLIRKGYETHVLLQSPVVSVGA

SEQ ID NO: 72467 - protein, 78 aa, Homo sapiens
LKRPRTSGHQTGWLPRSRSLRPGRPWHPYTLGLLPSSASLAPARLHPGLRLLVTGCVSPFCPWAAQSPQSRPSHAERT

SEQ ID NO: 72468 - protein, 24 aa, Homo sapiens
MKPVCFSAATSPRSCSGWCPPGPR

SEQ ID NO: 72469 - protein, 26 aa, Homo sapiens
MKPVCFSAATSPRSCSGWCPPGPSAL

SEQ ID NO: 72470 - protein, 60 aa, Homo sapiens
MERLSHMRPWPCLQAPAACQTLSPLGLYLAASQQAFAAGFTGFGGFCVLTIDSQAPESAA

SEQ ID NO: 72471 - protein, 43 aa, Homo sapiens
MEPLSAEPSAAAAAAAVPPLFFPGRSLLCGRAAGMDLSLRIPC

SEQ ID NO: 72472 - protein, 57 aa, Homo sapiens
MCFMLKLLIDVQTNLLSLNPSSSSKCKTSMTTLQNSQMDHTLLLCLKCQIWVPLFYR

SEQ ID NO: 72473 - protein, 31 aa, Homo sapiens [sequence omitted]

SEQ ID NO: 72474 - protein, 47 aa, Homo sapiens
MLGFFVCLFVCLLFFFSTALVVPSLSLEQGWLFFFNKIAGAQDCFPP

SEQ ID NO: 72475 - protein, 54 aa, Homo sapiens
MFFCRNYGSFWFYVLSKMLSFFICLLIFVHLLLLSFLISDWPPPTGSAEHKYSG

SEQ ID NO: 72476 - protein, 44 aa, Homo sapiens
LALSPLSCFVAGILAKTLSLPPYSSRVVIFFFHQEISLAGNLSN

SEQ ID NO: 72477 - protein, 18 aa, Homo sapiens
LQPVRSTSTSQVAPSLRL

SEQ ID NO: 72478 - protein, 110 aa, Homo sapiens
MKYCWPTLTFQLFSLHIVNDSPGDIILKSETQKRTQSPICLKNCMAIYLVNIFYFIRKNRQFNCRCDRFRLPSLSFLTSSYILQPPPEKQYGTGKKRSKGRTLGLHSQHC

SEQ ID NO: 72479 - protein, 80 aa, Homo sapiens
MRARLWPKIFRQMFPSFAISLFFPPLLLLVSRQPSWKSLGWVGNEDGRFHSRYSPLRSNLMQREFSGLCATLHGILSLDF

SEQ ID NO: 72480 - protein, 101 aa, Homo sapiens
MRIATTLAAEAAALPARHHRLLCLFPSLSPGPCIDLARAAPHCACQLSHALRLSTAGRQGQTSRGKRKQPAQTGTARVLFDQHWNWKLGFEEVKSKYNIVF

SEQ ID NO: 72481 - protein, 58 aa, Homo sapiens
VAAEMYELPVLRAAATAVASATCHDRASPWRLVTSASFSTAPMVPLGASVAGLAAPGW

SEQ ID NO: 72482 - protein, 34 aa, Homo sapiens
LTAVHFCILSEIVKMAKGVILAERSWLIEGRATG

SEQ ID NO: 72483 - protein, 33 aa, Homo sapiens
MVPTAAIAVGGYFLGGVSSVHGVTLRPLLAAPA

SEQ ID NO: 72484 - protein, 92 aa, Homo sapiens
LCPAEPRCLLGWLAAARGGGWPFIWGALSLPGQALEQSSSGSCLHLQDVQQAARRRMPATHPPPVPSLSPVGHSRFCLFPVYCPQCRGLCCP

SEQ ID NO: 72485 - protein, 69 aa, Homo sapiens
LQPLPPLLASAVAAGDCGSLRVPLAGREVPLLFPLPFPKSCLLVLSLKKILQSLLILFLGVTIFEAKLT

SEQ ID NO: 72486 - protein, 34 aa, Homo sapiens
MIMINEDTALLVLPCTILPMTRGLASYCILRTSS

SEQ ID NO: 72487 - protein, 22 aa, Homo sapiens
ISSQAAVAVPAAAAAAAAADML

SEQ ID NO: 72488 - protein, 35 aa, Homo sapiens
MAPTSPPVSTLGLLLFRRTTSGPPSSKTARAVVVP

SEQ ID NO: 72489 - protein, 53 aa, Homo sapiens
MTSLSTPISPLWTLLHLRRSKSWSAMLPSLSSCTAKILKSRMPPFSQRKIQDT

SEQ ID NO: 72490 - protein, 23 aa, Homo sapiens
RRPRACTSLAVSSPSASGAFSVE

SEQ ID NO: 72491 - protein, 45 aa, Homo sapiens
KPKKMKGLFLLTTNVSVPGLLPGSSVLPKILMRTLWRETSELLFL

SEQ ID NO: 72492 - protein, 41 aa, Homo sapiens
LSLLCPPPPPSAFALLSSFSPEVRAASSPLVLFLPSLCSLL

SEQ ID NO: 72493 - protein, 38 aa, Homo sapiens
KQRKVHPSLVSRTRRLVQVCLFWTSSMPSNQVPLTMTF

SEQ ID NO: 72494 - protein, 51 aa, Homo sapiens
MGRCCSRSCWWPPLPAWPSSSLPSARGTPPDTRPFWAWRSWCWRCLRPSLC

SEQ ID NO: 72495 - protein, 53 aa, Homo sapiens
KGLQKTFLSHIFLLLISQQLKFQLMDSILPVKTSSPENCASWHPAVPKYYLTH

SEQ ID NO: 72496 - protein, 32 aa, Homo sapiens
MALGALLPFSIIMWTTGATAQSKTLQFLSGLN

SEQ ID NO: 72497 - protein, 93 aa, Homo sapiens
MRFLISIICTWRFIQERITGADLNHGAHKWGGCSSGHGKNFLLQLETAFCVAGYHADSTNTNPHLDAVQTPDVPPISVSLGNVSMTERLKDRV

SEQ ID NO: 72498 - protein, 26 aa, Homo sapiens
KVRLVALTSAALPLLPRPRPSPCDRS

SEQ ID NO: 72499 - protein, 69 aa, Homo sapiens
IRVGIKRRKAALLELCGLLQVRVAGNRTTLLLEEKEEFIFSRHKKSSFFFRDSSLLLNKELTQRLTQRK

SEQ ID NO: 72500 - protein, 44 aa, Homo sapiens
VAGGRAGPTKMAAAPAAGAIWATAAAKAAAGPTGGLHGGSRGWP

SEQ ID NO: 72501 - protein, 64 aa, Homo sapiens
IFVIIIFYVRCCKKKTSAAEGPELVSLQVLDQHPVGTSDHRDATQLGFQPLMSALGSTGSTEGT

SEQ ID NO: 72502 - protein, 74 aa, Homo sapiens
MWRSSARASVVMTVFALRGEGMCDHFQRLTCIPQIVWMSYNLNLQTQYSQTLGSDSLQASCTSPRKRACFPLDM

SEQ ID NO: 72503 - protein, 40 aa, Homo sapiens
MASFLEACETTNPSIKKRPLIRRRLLVSFLGTHSGFLQSR

SEQ ID NO: 72504 - protein, 43 aa, Homo sapiens
MSCRSCLRCRLKSVKLMSSSLWTTTAVSTWTASLLRSRPSTRI

SEQ ID NO: 72505 - protein, 61 aa, Homo sapiens
MSLLLHPAPLGAASVIHALPGPSTHCCECASPEPVKRQLSILETQIIRALPCTEEKGSTRP

SEQ ID NO: 72506 - protein, 25 aa, Homo sapiens
LRGKMARTVAASAAQVVVEAEAQAA

SEQ ID NO: 72507 - protein, 70 aa, Homo sapiens
LPFARPAGRQRRGEGKPHHFSRSIKTERMFPRLSKRKTTIFLLRLFLGLAGEAGVRGWNCVHKNCGYFNI

SEQ ID NO: 72508 - protein, 40 aa, Homo sapiens
KQPRSPVTALSLHMLLMVSSAPSCGLIQTVSSFTVYIFTL

SEQ ID NO: 72509 - protein, 51 aa, Homo sapiens
RPFSAVFAPSMLASQVPPLSSLRIRRKQTPLLSRICSSVSSTSSTRYVTLA

SEQ ID NO: 72510 - protein, 47 aa, Homo sapiens
LLLLTTTTTTGAASAVPGVSSCSGHTAPGDCSSSNQNLGLTGTLAPK

SEQ ID NO: 72511 - protein, 74 aa, Homo sapiens
LLPRVLSHLAAAAPVQTLTLPPKAQPSPNNPQPCTDVGCESLCLSKNQALLETFKQRLDNYFSRTERKLMHQKR

SEQ ID NO: 72512 - protein, 87 aa, Homo sapiens
LDFQLALAISPAPLRGTAPAPVSAVPLTLAPPSGSPWTVTQPAPPLLVATGWEWLRGYLLLAACQREEGGGKKKGGGVEGGGPGPGE

SEQ ID NO: 72513 - protein, 25 aa, Homo sapiens
MYKPGFFFYTTLTHLLHSFSCEICE

SEQ ID NO: 72514 - protein, 45 aa, Homo sapiens
MHQVSGPAMTLSLCWASPCCWEPPGPWPSFLLASSCCPSCSSSPS

SEQ ID NO: 72515 - protein, 67 aa, Homo sapiens
KSGWAAAKSLSLWSSSGSCWRLAAPAALASSSRRPLPSLMLRVMGQLMPRTCWRPSRIPVELIFRGS

SEQ ID NO: 72516 - protein, 46 aa, Homo sapiens
MAASPCTFSCLSTLQVPSGLCPHCCIVAGCHRPSAAPGCPGLCRDA

SEQ ID NO: 72517 - protein, 48 aa, Homo sapiens
MSDSICHQGWQKMASPGELKMSFHICKSGCVGTVLNLWIQGSMNTESA

SEQ ID NO: 72518 - protein, 33 aa, Homo sapiens
MASCSLLSFIASCLYSVFWETAWSSWSLWSARS

SEQ ID NO: 72519 - protein, 72 aa, Homo sapiens
RKMKAVVARTGAAAVSGEGRRMQRPPAWSAGPGAATRAGRGGSTPWAPHSPPQVLRMASRETRKWTPWLLES

SEQ ID NO: 72520 - protein, 42 aa, Homo sapiens
LMYWKCFLTFGSLCSHCPHPRPTTKNPAEAETTKRQSSLLLQ

SEQ ID NO: 72521 - protein, 22 aa, Homo sapiens
MALKTPALCTSFLTSGQEQQGP

SEQ ID NO: 72522 - protein, 35 aa, Homo sapiens
LPKTCARGLLIALSPSLVSRPLPRLAISLLYFLSL

SEQ ID NO: 72523 - protein, 90 aa, Homo sapiens
RSRPRIWAWRGPWCPWPGFPRPERCVWWGMVPLWTCCCWSCTWRMSAAVVGGPWRTCNAYPGPWALLPPSSSGKWQNECCSRSTGCRAQS

SEQ ID NO: 72524 - protein, 36 aa, Homo sapiens
MAGKKLLKTGWVSWLVPVIPTLWEVKLGGSLEGLTL

SEQ ID NO: 72525 - protein, 28 aa, Homo sapiens
MLNLLSTLIFHFTFIRTTGAVAEMSHGR

SEQ ID NO: 72526 - protein, 48 aa, Homo sapiens
MDFFFLERSYWGKMILLLVTYSPIAYSHPPRFEIAPLGRLRRARSRAE

SEQ ID NO: 72527 - protein, 11 aa, Homo sapiens
IELYLICMFIS

SEQ ID NO: 72528 - protein, 32 aa, Homo sapiens
ICLLIFVHLLLLSFLISDWPPPTGSAEHKYSG

SEQ ID NO: 72529 - protein, 20 aa, Homo sapiens
IFLPILTYLKLGCISLLSTR

SEQ ID NO: 72530 - protein, 41 aa, Homo sapiens
LPSLPHRVSLCHLGYSAVAQFQFTATLTSWAQMILAPQSPQ

SEQ ID NO: 72531 - protein, 57 aa, Homo sapiens
RIPVMMLMSLSEILSVLFLLHCTEPLRVECEVLIYVCLVELSYQEHIDALKDNPRRV

SEQ ID NO: 72532 - protein, 33 aa, Homo sapiens
IKMGFAVSVVGTSGGLIVSLLPAFLRPGAERCL

SEQ ID NO: 72533 - protein, 39 aa, Homo sapiens
VRLGLGAGAAVAPAAAAAMEAMPEPRTHAGGGRDSRRYS

SEQ ID NO: 72534 - protein, 19 aa, Homo sapiens
ILVLALPLTVWPWEVLCLL

SEQ ID NO: 72535 - protein, 27 aa, Homo sapiens
KMAAAAAAGAQLSWAGTALLELPQPTT

SEQ ID NO: 72536 - protein, 47 aa, Homo sapiens
LKMILQSLLFLQRLLMISTKPAVVLLWPLLKKVENTLMQHVHPNLPA

SEQ ID NO: 72537 - protein, 87 aa, Homo sapiens
MPPEDFCAWKISVNRLLLHLRLHPHDMLSLSPSPLFSLLSLLSSLLSLSSLSRTHTLESQLPYWELPNGEAHIPQGTDVFSQYLART

SEQ ID NO: 72538 - protein, 77 aa, Homo sapiens [sequence omitted]

SEQ ID NO: 72539 - protein, 16 aa, Homo sapiens
LARPLPLAFEAKASSR

SEQ ID NO: 72540 - protein, 65 aa, Homo sapiens
RSWGGTVCLVWVTSPTCPMSWPSFMKPCASPALCLSLFLMPPLPTPLSWATTFPRTLWFLSTSGL

SEQ ID NO: 72541 - protein, 28 aa, Homo sapiens
VRDAVSCVIPVIALQALSPSTWSLCPGR

SEQ ID NO: 72542 - protein, 32 aa, Homo sapiens
MLLSLPSAPATWIVSSPSSSFSAALFSTASGN

SEQ ID NO: 72543 - protein, 52 aa, Homo sapiens
LANPLPGSKCLQLGVSGALATSGAASCGPITLFSKRTCQRLGVLTAARTKVG

SEQ ID NO: 72544 - protein, 80 aa, Homo sapiens
LPACLPLCVCERVCVRLLCTGKNTAHVLCMDVTDTLFSLIFEKQARCPAHHMTPSILLLSAHFIGGIHHTWYSQSTESMR

SEQ ID NO: 72545 - protein, 43 aa, Homo sapiens
RNTAKSTGRSEMWMLLLHLRGHLSPAPPKMSCSPPERALHVTK

SEQ ID NO: 72546 - protein, 66 aa, Homo sapiens
LTLDIKGGIMWLLKPSAHSPVHILVLLFPRGWSQPGTHKRQILVNAASLPGGCLLPWIWSGAALRF

SEQ ID NO: 72547 - protein, 41 aa, Homo sapiens
ICALGPGLLLSLPSIGAQHPLPAHPSDSNSSPAPRPCVHFS

SEQ ID NO: 72548 - protein, 33 aa, Homo sapiens
LLLVFSPVLFSPLLRKACQGVGERDANTKVENS

SEQ ID NO: 72549 - protein, 53 aa, Homo sapiens
LSRGRRKRRKHKSGKQLMTSHGVPAVSSGRCLPGLPSHTLGVLAEGTWLVGLS

SEQ ID NO: 72550 - protein, 23 aa, Homo sapiens
LPLLLLLRLLAEAGGSSGGGGGG

SEQ ID NO: 72551 - protein, 27 aa, Homo sapiens
MLAHLAADLLSPATLFLSRTFPLLCLL

SEQ ID NO: 72552 - protein, 52 aa, Homo sapiens
LNSPAALGFFVASFVIGARPTPQQPCPRDLQLVLILAPPTLVWVFSSTEKSR

SEQ ID NO: 72553 - protein, 25 aa, Homo sapiens
LQLLGFLWLPSLLEPGLHPSTEKSR

SEQ ID NO: 72554 - protein, 55 aa, Homo sapiens
RHLALRPGYVSPRARVGLLPGPLAARVHGVPGIFRVFWHLPPLPGAHLPAPVRQP

SEQ ID NO: 72555 - protein, 36 aa, Homo sapiens
KGMLAALWVGTGVPQPSREDWCAQSQPILELSEATS

SEQ ID NO: 72556 - protein, 53 aa, Homo sapiens
ILQDSFFTLSTCLVRLHRTVVYCPPLLTSSFSLALSVFLFSPSSLPLAITSGK

SEQ ID NO: 72557 - protein, 59 aa, Homo sapiens
LWISLRDHPKRRKVTSHSCPLAALCRNASSAAKRPEPLGQSCPGKPGQPTPGSEGVSRE

SEQ ID NO: 72558 - protein, 31 aa, Homo sapiens
RKCCLGMSMLMIIRSMLSTELPDNICYAECL

SEQ ID NO: 72559 - protein, 26 aa, Homo sapiens
LRASLSATLLRASEPASRRPAEQNGK

SEQ ID NO: 72560 - protein, 53 aa, Homo sapiens
MLRYRGSGSLLCGPFLQSDFALLSSPHSPLHLPHQKREVGATTALSAQAPVSW

SEQ ID NO: 72561 - protein, 115 aa, Homo sapiens
VSRLAPARSGDRGARGRGEARTGLRWARELCREEGRRTMDWGWGMVGIPASANPSNGGAHRAVGSEGMFSPGPDRALSGFNLSWSSRHRFMKRYRCVHSSLELIRPPTPTSGKRF

SEQ ID NO: 72562 - protein, 63 aa, Homo sapiens
LSDMSSASMRTCPVQSTISTERYHQHILSLCCSKLGSTMMLAGSCLGGGWPPGHQESSTLIPH

SEQ ID NO: 72563 - protein, 91 aa, Homo sapiens
MTGCLLGGFSGLAMKALPEEKQSSISLFWRAVNVTRPINYLTEVLNFENESSGGEFCPFQPGELCQGSPERLFQLIKLARGPSLPPCRKCL

SEQ ID NO: 72564 - protein, 66 aa, Homo sapiens
LHLLLKATAALLTSTLSPPYSLRRKSRRARMLCKSSMSSWWKRGLRPSACSCCTAAWPRATSRAEN

SEQ ID NO: 72565 - protein, 34 aa, Homo sapiens
LRRPGVHVGLLSCPVFLVGMERSCVGPCCGLPKC

SEQ ID NO: 72566 - protein, 72 aa, Homo sapiens
MGCGVPAALQPHVASSSLSSGSRPVSAAELRELSVQHSLGPPWPVPSLSGAAVISSPSLSARDSSSSVTALG

SEQ ID NO: 72567 - protein, 77 aa, Homo sapiens
LWAAFLTLDACGQPSSPWMPVGCLPHPGCLWAAFLTLDACGLPSSPWMPVGSLPHPGCLWAAFLTLDACDLVSMGAS

SEQ ID NO: 72568 - protein, 94 aa, Homo sapiens
MRKDSYANSKRLSRMSCFIRELLVPILQKSFLGLCATTTRGICKEGNARHRIRGRCSSASGVLRVREPPSPSWPVTLCDFPPWCRVTLSQVGGG

SEQ ID NO: 72569 - protein, 77 aa, Homo sapiens
LVIMWEWLPVHATGLQLHCLNGAMSHRGGRQGAGHLITRAVTSQGVEGGGGYGTPCLGCFCGACGLWAPTSMGLQEP

SEQ ID NO: 72570 - protein, 110 aa, Homo sapiens
MPRWVLWAGARARFWAEASPGNPVSSLLASDPVWSGLHGCRAWGGKFRSWLCLCLMWMSSSHAQGHLRLSLLSPGYWEESLRASLPLLPCPGHTLYLLICSSPPCRLLGR

SEQ ID NO: 72571 - protein, 38 aa, Homo sapiens
MHTASMHVSHTLATLAASALQSPSPRPLVGSLVHTGGK

SEQ ID NO: 72572 - protein, 83 aa, Homo sapiens
LNSVHAGLELRPCVFSRLLIRRGALGAPAWVAVPSVCGPQFLGGAWTLALRGRPVPRSVATDPRTLFAGDSRSLRLPRMMACD

SEQ ID NO: 72573 - protein, 123 aa, Homo sapiens
LNSVHAGLELRPCVFSRLLIRRGALGAPAWVAVPSVCGPQFLGPRRGFVGAPGDIWAVLAVSGSRARSLPGLTAADLVLHFLGGAWTLALRGRPVPRSVATDPRTLFAGDSRSLRLPRMMACD

SEQ ID NO: 72574 - protein, 32 aa, Homo sapiens
MPRAGLIGPSGGFSVPQAAVAISGADWLVPWP

SEQ ID NO: 72575 - protein, 30 aa, Homo sapiens
MLRPARNASLALCSHGRHCLSQPPPEPASR

SEQ ID NO: 72576 - protein, 52 aa, Homo sapiens
MEGCLLSTLSTPSTTSAASPGCSLSSLRSSIPWVLRSSRLWSKHFSPTISQW

SEQ ID NO: 72577 - protein, 87 aa, Homo sapiens
LSYLHHRGGALAPDEETEARERKCWLAWCHAEGLRGQSPVGPRTLLLVGCFSPLLRLGNPFPHLHGAGVSGPGLSWLTAALGARLAG

SEQ ID NO: 72578 - protein, 78 aa, Homo sapiens
MADARGPAHAVQSVPAVSGGPQVAKARSAQLQEGMDVDLGRAWRASLPLAHHHLYFAVEETLVCADRFKSQILQRLHC

SEQ ID NO: 72579 - protein, 99 aa, Homo sapiens
MEPPPPPTHASLFLLFPPLFVCSGLNVGSMPGPAPPQSPGHSFPSSSLEGRGQRPQEAKGLQSPLVLTHSDGHWYSHRSPSMPRTGLGPLQPGLGAALR

SEQ ID NO: 72580 - protein, 79 aa, Homo sapiens
LVSCPLLFLSQLLGHLVPTTATLWGRPPSPRVTLKPTTSLSLPGLKGDAGFRRQEAGPLGVAGERECISLATGGLLLLA

SEQ ID NO: 72581 - protein, 50 aa, Homo sapiens
LGHVSCLIACWSCKQALSSTVPVPCPNLAPSKYRRPSFPPFSILLSVLSG

SEQ ID NO: 72582 - protein, 100 aa, Homo sapiens
MLTEQHALLAPACTSASRAASELREDPAGAPSSAVWGAEVWRSWGAAMQIPTYPAGPEARGSQAGWEQGLAWEVWGTDKDDGPLRGKTRIRDRSGGPGHG

SEQ ID NO: 72583 - protein, 59 aa, Homo sapiens
MPLHTLFSPPATFSPLLLPLQTPMQPSRPHSPLESLPDPLGNNHHQYLFTEPTLCQALF

SEQ ID NO: 72584 - protein, 37 aa, Homo sapiens
LAGKMAAGTWAAAAAAAAAAERTRGVRGARSRAGAGP

SEQ ID NO: 72585 - protein, 191 aa, Homo sapiens
MQLSRAAAAAAAAPAEPPEPLSPAPAPAPAPPGPLPRSAADGAPAGGKGGPGRRARSPRALRSPARAAPARAPARGWTAPGPAPWSCASASRTCSRRSACAWTRPRPCGPPSSACSAPSTTASRTRSTMGFSSRPPGAAPASSWMRSGSCRSTRPTWTRPCPTWSFDTSGEFMPRTSSMISSLQSFTQRRT

SEQ ID NO: 72586 - protein, 48 aa, Homo sapiens
MAAGVIFSVCVFRKAAVSCLSTKTQCHLLLLFLCHSRTSADLSHRLPV

SEQ ID NO: 72587 - protein, 10 aa, Homo sapiens
MWFCCLWALL

SEQ ID NO: 72588 - protein, 68 aa, Homo sapiens
MWSAAPLGHLSPASTPPGTAASSPTTQHPGKWSRSWWPLGSRPLASVPSTTWAPTPSASPSSSCSALS

SEQ ID NO: 72589 - protein, 230 aa, Homo sapiens [sequence omitted]

SEQ ID NO: 72590 - protein, 40 aa, Homo sapiens
VGPLGRLLWCWAGVPGAAAVPTSVCWGRAPWRENMEPLLA

SEQ ID NO: 72591 - protein, 16 aa, Homo sapiens
KLVFFGGGFSIVLSMC

SEQ ID NO: 72592 - protein, 11 aa, Homo sapiens
MVAVGWTWLMG

SEQ ID NO: 72593 - protein, 29 aa, Homo sapiens
MNLASRPCFSLFFIHIHSQHLRRCCLIYF

SEQ ID NO: 72594 - protein, 36 aa, Homo sapiens
LVAKGRRRGLSFRGSLPFLCCRSVTLALSPCLDHFL

SEQ ID NO: 72595 - protein, 60 aa, Homo sapiens
LKKLCPSAALILCLALLAWCRACCLLTLTMSCPGPDPPEGPGTQRVWQGALRILQLPGAP

SEQ ID NO: 72596 - protein, 51 aa, Homo sapiens
RSRHHGFLQSSAGGASTLGLPAARGQGLQCAPLHFPAHSWGQSGAGRSGRG

SEQ ID NO: 72597 - protein, 9 aa, Homo sapiens
LLVVFPALL

SEQ ID NO: 72598 - protein, 32 aa, Homo sapiens
RGSRRACVSRTNSGSAVWLLCCCSWTGWADRC

SEQ ID NO: 72599 - protein, 43 aa, Homo sapiens
ITISSNSSSKHNSISCFLLLSFLILSKFSDSRKRNHSPLPPTT

SEQ ID NO: 72600 - protein, 54 aa, Homo sapiens
LTSVYLRVRPILPAGLCLGVTLPELAPTTVATVMLMCDCCQEPAHMTVWRKFFP

SEQ ID NO: 72601 - protein, 9 aa, Homo sapiens
LLMIFFLEL

SEQ ID NO: 72602 - protein, 7 aa, Homo sapiens
ISLLTLL

SEQ ID NO: 72603 - protein, 40 aa, Homo sapiens
MPVFLPWTLSSADSPRPARALLYTTGSGAGVEPGGRPLPS

SEQ ID NO: 72604 - protein, 7 aa, Homo sapiens
LGCFWLL

SEQ ID NO: 72605 - protein, 9 aa, Homo sapiens
LGYKWLLVI

SEQ ID NO: 72606 - protein, 23 aa, Homo sapiens
IWMCPVLSCVFSALSMVSFSENE

SEQ ID NO: 72607 - protein, 47 aa, Homo sapiens
KTWTIEWSRNSPLSLTITVAFLWSSSSPRIPKTAAEFIKIKFVNVTT

SEQ ID NO: 72608 - protein, 43 aa, Homo sapiens
KPLFLSPLPTLPPLTLLLTLLEPCLPGGPISSGRPCLWATWSV

SEQ ID NO: 72609 - protein, 44 aa, Homo sapiens
RMRRRRSAVGSVSARGCGGAGGSSLSGFSLGGGGGGSVDASSAS

SEQ ID NO: 72610 - protein, 18 aa, Homo sapiens
LSRITLTTTSALLLGHLL

SEQ ID NO: 72611 - protein, 22 aa, Homo sapiens
TRGEVLSAVALRLLALISRLPL

SEQ ID NO: 72612 - protein, 28 aa, Homo sapiens
LSLHWCASGQAALLGPGPCLPTPPPSWA

SEQ ID NO: 72613 - protein, 42 aa, Homo sapiens
MNTSHSCISLPPSCIFSLCPLISVSPWEHMPPVSGPPFFFFF

SEQ ID NO: 72614 - protein, 15 aa, Homo sapiens
LRRGFTMLLWLVSNS

SEQ ID NO: 72615 - protein, 11 aa, Homo sapiens
LTLSLCCLLLS

SEQ ID NO: 72616 - protein, 184 aa, Homo sapiens
VSPRKVWAAFLTLDACGQPSSPWMPVGSLPHPGCLWAAFLTLDACGQPSSPWMPVGCLPHPGCLWAAFLTLDACGQPSSPWMPVTWFPWGLPKLRDPKPPSNLMTRLVSEHTCVVPEPLTNPLCNPAHAFPILKGPAHRPAHVFPLPLLCPYLVGSCPFWALVWHFTHKCVLWVVSGPPPAVRG

SEQ ID NO: 72617 - protein, 50 aa, Homo sapiens
MNRHVAAIGPRFKLLTLGLSLLHADVVPNATIRNVLREKIYSTAFDYFSP

SEQ ID NO: 72618 - protein, 101 aa, Homo sapiens
MAPPPSSPCSPSMAAARFSSVLWTTVTVLPWPTMAATSPTPAPATFPGQCPRRSTHTRSRPHPPSPSPFPAWRSETGLTPPSSPATRISTGCMGSRPPNTT

SEQ ID NO: 72619 - protein, 39 aa, Homo sapiens
MNGGWKMWSALIRICVRLLATQQPRRASLQASARVPSAR

SEQ ID NO: 72620 - protein, 86 aa, Homo sapiens [sequence omitted]

SEQ ID NO: 72621 - protein, 33 aa, Homo sapiens
LRLRLLLLVLGNPSGTGKSKKEAKTSIRSLTQK

SEQ ID NO: 72622 - protein, 36 aa, Homo sapiens
KPSLHCSSSASLLAAAASAARLLRRRGLRQLYRQSP

SEQ ID NO: 72623 - protein, 30 aa, Homo sapiens
TQLREGFVLSSVLWCRASSSPAQPRRFGHI

SEQ ID NO: 72624 - protein, 69 aa, Homo sapiens
REEMEITSPDLAFLSLFLFSPLPSDDWRVKGNPERGGEQRFEKMQECVWRRVKLPFKLWPPGTRCSAAG

SEQ ID NO: 72625 - protein, 53 aa, Homo sapiens
REKQSGAGASSAARSMVGAHSPRRPVLRSTSFTSSSASSFSGAAGGAVWRPAS

SEQ ID NO: 72626 - protein, 46 aa, Homo sapiens
LEVELKLCSCLFLAVDAALGGPGRLQGDSVGIVKEKGVGRKVEGLI

SEQ ID NO: 72627 - protein, 31 aa, Homo sapiens
VEAVAVLYLQGLCPVHGASCMSCCPELSRAR

SEQ ID NO: 72628 - protein, 28 aa, Homo sapiens
KPPPMSSTREACLWALAWTLAGREARGF

SEQ ID NO: 72629 - protein, 118 aa, Homo sapiens
MGTRRTPWELTFLSSLRSGAPTHAGRVFMAFPGQSDTKMQWPEVPALPLLSSLCMAMVRKSSALGKEVGRRVKEMVMLVAPFRQSSSLSRTFSSRKVVKAHASLHGARLSPLSRNIRG

SEQ ID NO: 72630 - protein, 83 aa, Homo sapiens
MSSRHLSALWISSATKCQRVWRLILPSLLQSRTRDSRKLLLHRSPTVPASVPVHTGSSRGLWLPTNSICKWSISLHLYCLTII

SEQ ID NO: 72631 - protein, 84 aa, Homo sapiens [sequence omitted]

SEQ ID NO: 72632 - protein, 57 aa, Homo sapiens
KKARRSSFHLAGRATCRLRAGGTMSTRPPMRPPGNVPAVLLGFQPALALTGALCLQQ

SEQ ID NO: 72633 - protein, 42 aa, Homo sapiens
RVLLSLCLLEGIWHSPAAAAGGGSHCSSWPSLYTTFQVRSCP

SEQ ID NO: 72634 - protein, 40 aa, Homo sapiens
RVLLSLCLLEGIWHSPAAAAGGGSHCSSWPSLYTTFQVSI

SEQ ID NO: 72635 - protein, 52 aa, Homo sapiens
MENMRPGSFSFIAFLATEVSSCFPGRPDCMTGMWLLQLQKKQRTLLAMAPRR

SEQ ID NO: 72636 - protein, 21 aa, Homo sapiens
REDLDHGGRGWRLCRVQRYHL

SEQ ID NO: 72637 - protein, 41 aa, Homo sapiens
MLALHSILQWPPLLQQMQSFASTCSERWMTIKEMEMCSFPL

SEQ ID NO: 72638 - protein, 31 aa, Homo sapiens
MPSTCLTVQGGMPPNASAKLSVPLWSASLTP

SEQ ID NO: 72639 - protein, 40 aa, Homo sapiens
RSSPPRAPAATASPACMFAACLVPGTRSSSRTAMPWTWAR

SEQ ID NO: 72640 - protein, 64 aa, Homo sapiens
LISHSTTALHGFVCFFTAHSQPFVMPFSKLISECSLSLKLCNTKITRTPKQQPKIYCGMHLINL

SEQ ID NO: 72641 - protein, 35 aa, Homo sapiens
MMPRKRRCCPTWGPILAATWSRQNRSVVSGRRGGR

SEQ ID NO: 72642 - protein, 31 aa, Homo sapiens
LLPSMGAALAEVWTLSPPVTSGTVPRMLSSR

SEQ ID NO: 72643 - protein, 116 aa, Homo sapiens
LDFLTPSMRLRGLLQGTLRFHTSPPTDSSVTETIILCTMLFLGSLGAWGTTSISTGSIFSLKTLRSQHGGQVGLKVSRPRAPRMGAATPTPRAPWVARWLMGSQAFTATPSARPPG

SEQ ID NO: 72644 - protein, 36 aa, Homo sapiens
RTAWHWLRVFLRVESGMTYDTCTAWLCLTMMQSATW

SEQ ID NO: 72645 - protein, 37 aa, Homo sapiens
LAKLFRFNLLASKILGSCITCLPPYCYSNWLRALVWD

SEQ ID NO: 72646 - protein, 94 aa, Homo sapiens
LSLEAQPQVLELQRDPKGSRLCQIQMGPIQCFILLQSLSQTVSPRSPSSGFCVPHGLFPASLLVPLLRIHLSIQCFLGLCSEAGHHWALWINAR

SEQ ID NO: 72647 - protein, 68 aa, Homo sapiens
MSHMVPLALLLPLFPTSRRAALPFLPLFFGLMFPATTDLPPPHPSADLAVHCRHGGLISDRKLRLSER

SEQ ID NO: 72648 - protein, 38 aa, Homo sapiens
RRTRRASRRRTRWAPCWVAAASARSTRVAASPTGSRWL

SEQ ID NO: 72649 - protein, 70 aa, Homo sapiens
MASWACTAALAPCSTVPSPRRPSGLECSSSSATTCGMPRDGWTARVGCCAAWALAWPRPWWSCAPWRPSR

SEQ ID NO: 72650 - protein, 47 aa, Homo sapiens
MLAAPSQALGPPSCLALADGHLCWFHQPELCQRPRSPSPRRTLEAIK

SEQ ID NO: 72651 - protein, 32 aa, Homo sapiens
MPECMVFSHGMLSLARFVAPTFCPSAKQLSSK

SEQ ID NO: 72652 - protein, 25 aa, Homo sapiens
TATATAAGTAAVAGAAAWTRLALAP

SEQ ID NO: 72653 - protein, 42 aa, Homo sapiens
MAKAGSIFIIILTSTFQKPHSKTAAPTSAGGFLGVKMCLQRL

SEQ ID NO: 72654 - protein, 76 aa, Homo sapiens
LGALEFWREGSCQMEAGRNETDARRSGEPRPSAIAASGAASSFPASRPRLLPALWPGGALQAPSGVVLGPWPLWEA

SEQ ID NO: 72655 - protein, 25 aa, Homo sapiens
RRSMKTKNMLVLLFSQNSLQELRRH

SEQ ID NO: 72656 - protein, 47 aa, Homo sapiens
MMKSLLFISIVIIRQEANLRVSRRLSSPLLVINRPRAMAFRINLGRN

SEQ ID NO: 72657 - protein, 64 aa, Homo sapiens
LWSTLAPLLATSSGPAPTLTGHLWRLCLSQGPWQRVGHCTLPHPSMPALLHYGHSPLGRSSASL

SEQ ID NO: 72658 - protein, 25 aa, Homo sapiens
LDMMILMSPTVLSTLSHVLLQLPAT

SEQ ID NO: 72659 - protein, 23 aa, Homo sapiens
LLTTTLTLLCATCCSDRVCWASR

SEQ ID NO: 72660 - protein, 44 aa, Homo sapiens
MPVAVPTQMWLHFLMATGWSATECPFHGCPEPRPLLQCLGGSYP

SEQ ID NO: 72661 - protein, 75 aa, Homo sapiens
MSSAGRWNIARFSLAWYWLPFSRKCARAVWSWIQPPWLASLSLMSLPLCSLLWESSALLDMRLEGCLGLPTHKLC

SEQ ID NO: 72662 - protein, 55 aa, Homo sapiens
LWPVKGAHMCQSTLMLLWRTLPKVRAARYPTSLNLILSTAASSLFLPCCERSNYS

SEQ ID NO: 72663 - protein, 27 aa, Homo sapiens
MGPRLALISVGSCVASTWTKMGRQSCC

SEQ ID NO: 72664 - protein, 22 aa, Homo sapiens
LKRCMTICISLLTESSLSCTRI

SEQ ID NO: 72665 - protein, 33 aa, Homo sapiens
LRSTRSAAVHFFRALTQGTLVLVGDGSSFPISA

SEQ ID NO: 72666 - protein, 38 aa, Homo sapiens
LRFKSLISSLFLLQDPEALSLSPWSSAGPWPCWGAPWA

SEQ ID NO: 72667 - protein, 23 aa, Homo sapiens
MSCSLQFFPLSALPSSGYWFFPS

SEQ ID NO: 72668 - protein, 32 aa, Homo sapiens
IKTVLSTMTGTASRLAGSSALGFCAPWASSSS

SEQ ID NO: 72669 - protein, 39 aa, Homo sapiens
LSFSGRMEFRRWWNLTQFKVPSGPRPLSMGLISILAVAL

SEQ ID NO: 72670 - protein, 37 aa, Homo sapiens
LVKVIASLFCLKPSVAAHHTRIKWKLLTIGSSLCPPL

SEQ ID NO: 72671 - protein, 49 aa, Homo sapiens
LFVIKRGQRSLTHRGTWGGTVLLAQACQRLVTVGPPPFGLTPRPPHEWY

SEQ ID NO: 72672 - protein, 60 aa, Homo sapiens
MRFKASAESGLGSLGERTPSALVLTCLPAPSASCQQRPRLRNCHSSSGCCTSFEVTGDPP

SEQ ID NO: 72673 - protein, 26 aa, Homo sapiens
MSFGSKSFTAQYMCSALLPQSCSKRS

SEQ ID NO: 72674 - protein, 81 aa, Homo sapiens
LVLGSQPGVAALLAAGFTPTSSWLKAVLCFEMQPMNTQSDYPDLGRPAVLARVVWPAMGDPGGVTCPFHVLGAFSPTKHLQ

SEQ ID NO: 72675 - protein, 73 aa, Homo sapiens [sequence omitted]

SEQ ID NO: 72676 - protein, 23 aa, Homo sapiens
LARSVCLLVSSLMPFSSPLPNPS

SEQ ID NO: 72677 - protein, 22 aa, Homo sapiens
LSSTSAILSLSSPASSGRTLSG

SEQ ID NO: 72678 - protein, 96 aa, Homo sapiens
VSLPAPCHALARTAAVTLVTTASAVIHAHVPSVYMSFGCQDSSWGEGWEWRVAGRSKALWRGLGPGPQQPGWLYVASDTLIPCPELRFWVGLQPHD

SEQ ID NO: 72679 - protein, 175 aa, Homo sapiens
LAAVNARFGNRKVEREVLGSASISVALFSPSWYSPPNLGFLHARVASCSTSLSLILVSTSSPGKFPFSRLALPTRASDFHPSFSLLASDYPPPIPPRPAAQLPPPFTRTGTIIPTPLRPVWDSTCLLPNPTLISAWSLPLWPNLSSRLIGDGHSHSLVPNTSSWMDSRHPCPLFN

SEQ ID NO: 72680 - protein, 30 aa, Homo sapiens
MGFYIWVCVSVCVCVIFFLNLCCGKVTTKL

SEQ ID NO: 72681 - protein, 44 aa, Homo sapiens
MLFYFGTCSGSRIKNLRWGKKALLSLTLIFCRYFVTQEDLIYSQ

SEQ ID NO: 72682 - protein, 72 aa, Homo sapiens
LLLETAAAAAAAAARGLPAAGAEVLAARAPRPLPTARRDAHSPSTRKEVPSPVTGSCRVQIYTELHNQPKTT

SEQ ID NO: 72683 - protein, 22 aa, Homo sapiens
LEKSLRLCVPLLHCILLCYVTC

SEQ ID NO: 72684 - protein, 96 aa, Homo sapiens
VVLSLSLSLCLAPGSAGSSRRLSRLRGPAPRPPRYVLIPSSGFHGAPQDYDAAQVAAAGGGGLRGGDALLGKPDPETGGVPLEARKGYCKTRSPRN

SEQ ID NO: 72685 - protein, 85 aa, Homo sapiens
VCVCVCVCVCVCVYPRAYARMQCRVCIPKADEILQNGCLTRQSQEDRPRRERLMCLHYQEIGFSKPARHPIQQYETGHISLRCQR

SEQ ID NO: 72686 - protein, 53 aa, Homo sapiens
LRPISAHGMPGWTTSGSGAFPGSCGGAIASQPTLSLSVTQRCPLGRTLMGGTG

SEQ ID NO: 72687 - protein, 112 aa, Homo sapiens
TRLLSRPLRTPIFGDRRRLVGVAALFSPCSPSPSPLGLLSSCLREAAELGPRGERPSPPRRSLLRQPPAPAREETGLPGLGRAGRPRGRGGPLLRRRGSEAPALRLWAMGDL

SEQ ID NO: 72688 - protein, 42 aa, Homo sapiens
LLFLVWRRSQWPNCRMKEQCGRSVLWMTTSAWPLQASPPMQG

SEQ ID NO: 72689 - protein, 37 aa, Homo sapiens
MWRTWMLSCFSSNGLRSRWPPSDLSDCVGAGPLVSNS

SEQ ID NO: 72690 - protein, 40 aa, Homo sapiens
MRVTASRPPSTIFSPSCLSTSLSSSRKLPTLTSCSSSFCS

SEQ ID NO: 72691 - protein, 72 aa, Homo sapiens [sequence omitted]

SEQ ID NO: 72692 - protein, 46 aa, Homo sapiens
MVTRSLFFFVLSPRFRSIGGSESTVSLWIVSAETEKKSRDSPTPPS

SEQ ID NO: 72693 - protein, 42 aa, Homo sapiens
MEMRPHKPKKKTSICSSICLLWFKNFFNLTSRCVNCDIWECL

SEQ ID NO: 72694 - protein, 23 aa, Homo sapiens
MPACCSVCCFLVSHLLTSWYNQL

SEQ ID NO: 72695 - protein, 36 aa, Homo sapiens
MVSSWRSLSSRFQTALFFVVSSNGRKRGGCWRKGGE

SEQ ID NO: 72696 - protein, 154 aa, Homo sapiens
MAGAAPRRRASWGCAESVRDPGATCQAGLRGGEACLVPTAVWLRDSTLAPSRRLLGLSFLALHPMLAARSGFPSCLCLGRGSCEHCTEAKTLLQPLRWAVETRAFVILNLIQGLGVVVRSGPPPVLQERPPPSSVGQSLGHAPGVGRSSWVSGQ

SEQ ID NO: 72697 - protein, 75 aa, Homo sapiens
MPSQFLLPLGSSFPADSRSLSTQIKRDLLSGRGAGGSTQHDHRGSAGPSIVAAAAAPAAHPASHRLRPRALLHPV

SEQ ID NO: 72698 - protein, 91 aa, Homo sapiens
VETRRRRRRRAGPGVARRGWGGVVAAAATATAAAAAAEVTEERGASSLPPPPDFNAQSPARQRFSLEYTLHIYGDSECEGRLLPGSAQHFR

SEQ ID NO: 72699 - protein, 37 aa, Homo sapiens
VVSARGMARKRPGMPATVVSQVSFVHSISLCTTTLQG

SEQ ID NO: 72700 - protein, 45 aa, Homo sapiens
MMLPTMLFCLSNLKGPSALNSSPDHLILQGPRSRSWSHQNFWAKG

SEQ ID NO: 72701 - protein, 62 aa, Homo sapiens
TAWDEGRRVCVLAFILLSWEPTAGGSFSGSLGGRWMGSRGPRGTGPGKRRRRRRRSRSPGEA

SEQ ID NO: 72702 - protein, 70 aa, Homo sapiens
VARSAGPRPALNGRDALLAPGAGAVARLRHLRDLRAPAGPVGVLCAAGTACGWPGPGPLLVERVRAFLRR

SEQ ID NO: 72703 - protein, 38 aa, Homo sapiens
LSLLQACSVWWLGSANPRAHRVGAAGKLLPLPAGRRHA

SEQ ID NO: 72704 - protein, 23 aa, Homo sapiens
LMTVCLYLTVSCFSNSMGLLSNR

SEQ ID NO: 72705 - protein, 47 aa, Homo sapiens
MSFTQKINSTWFLNFCTKISRNSWMPLLSLAFLFPSSRAICSSCSRA

SEQ ID NO: 72706 - protein, 47 aa, Homo sapiens
MAMSSMTSTSGLRCPSLTTVPAGVASLGSTCARLSPSRWPRKRSLSS

SEQ ID NO: 72707 - protein, 75 aa, Homo sapiens
KTWMKDDDFLNRKHKKVKKRSNKMILMNMMMTTLQPQLHFSHSLFNLSKVIFLQWHSQDCHQYQEHQECLQAYLH

SEQ ID NO: 72708 - protein, 29 aa, Homo sapiens
MTTLQSLMCLSPVSLIVTLQQLFMTLKRE

SEQ ID NO: 72709 - protein, 73 aa, Homo sapiens
MGTRRHAAGWAERGGRLQGPRARVKRGLGAGLAGLALPAPLRPRRPGNAHLGLRRLRWEDWSPSRASPPAPEH

SEQ ID NO: 72710 - protein, 67 aa, Homo sapiens
MKRRELSAAPSAVCPPAGGRNTWSDGIRPGLPWHLTSPTLHLRAHRPLRRPFPSPAPADSPCRQDFQ

SEQ ID NO: 72711 - protein, 26 aa, Homo sapiens
MKGFYICIFLIFSCRRHIRSAFHLSS

SEQ ID NO: 72712 - protein, 32 aa, Homo sapiens
LPPLLLLLLLPLLLHESPQPPALRVVATSSDR

SEQ ID NO: 72713 - protein, 37 aa, Homo sapiens
VAAAAAAAAAAAAAEAPVAAAASPATTTKKNPHQILT

SEQ ID NO: 72714 - protein, 39 aa, Homo sapiens
RPERPERGAAQTMGAALAAAGAAPRAAESWARRGPEAAP

SEQ ID NO: 72715 - protein, 29 aa, Homo sapiens
LMFLSAGPIVPLLRNVSPVQGQRLKRLLY

SEQ ID NO: 72716 - protein, 75 aa, Homo sapiens
VTFLSGQLSGALVSFLLCHKVRVLETQLSLEMRVGIAVVIMTPLRRGHHVGSLCWALIDGSPARPDLGCRSPAGF

SEQ ID NO: 72717 - protein, 53 aa, Homo sapiens
IRSDVSHCPGSVGPVRLGLGAGAAVAPAAAAAMEAMPEPRTHAGGGRDSRRYS

SEQ ID NO: 72718 - protein, 27 aa, Homo sapiens
ILNLVLSRCPLLSLSSLLRGSLFSGSP

SEQ ID NO: 72719 - protein, 19 aa, Homo sapiens
LGLLLTLSYLLRMQPCDSN

SEQ ID NO: 72720 - protein, 24 aa, Homo sapiens
MRCCACVAGGLAVRLTASGLRLGG

SEQ ID NO: 72721 - protein, 56 aa, Homo sapiens
IISLCIPHVFPSCPLEFGGTSRLRHPSQGEAKRGIRMGGFLIVATFATVHDSINIG

SEQ ID NO: 72722 - protein, 120 aa, Homo sapiens
MFQIRLSSLRKMTNPFQAWFKLKLKLCLRFSSREVLIVSWLFLVYWLRNCALEGRGVLRMGQLMEGEWKTLVAQENMSTSVHHCNSGLIIIFSASVSTNETMPLNHILCCLQYFPPLRHL

SEQ ID NO: 72723 - protein, 61 aa, Homo sapiens
LSLFLFLEHCSCCPLPSHCLASLIGRPLVAMCPLSPASVVSLPESATIDNDLLNLPLYSVP

SEQ ID NO: 72724 - protein, 67 aa, Homo sapiens [sequence omitted]

SEQ ID NO: 72725 - protein, 26 aa, Homo sapiens
LLLQLLQLPSGPTAAAAAFFLHDENI

SEQ ID NO: 72726 - protein, 178 aa, Homo sapiens [sequence omitted]

SEQ ID NO: 72727 - protein, 78 aa, Homo sapiens
VGGGVEMGIGNCTGGLRRMENPSSSCTRTEAKGPQFNRKPKTRARKRPNTRASETSMSLPGKTPNKGEGAGAAGAGVP

SEQ ID NO: 72728 - protein, 41 aa, Homo sapiens
VTSTTRPSTATSSASLAFATTCSLSTAAPPTRTSTSSYAEA

SEQ ID NO: 72729 - protein, 76 aa, Homo sapiens
LAKKLLPVASMTYPRLFDAIRCHLLLLLDPLASLPFHSLTTAPALPTQLRFLLLGGGKKLLIIGQRDLPLERPSAF

SEQ ID NO: 72730 - protein, 76 aa, Homo sapiens
LRQLPALIHSFIHSLTSCLLNSSGLALGSSESHTLPPATCEICLETVGYSGKGRCPENPSGAGQKHRPCWAEAGMG

SEQ ID NO: 72731 - protein, 23 aa, Homo sapiens
MPDAGHLLLYLGNSCWASLWPPW

SEQ ID NO: 72732 - protein, 20 aa, Homo sapiens
VPKPAPAKAGKARRVLPGTQ

SEQ ID NO: 72733 - protein, 33 aa, Homo sapiens
MEPLGCLTSSGCLIVCLVNADGLNWSIDPLSPC

SEQ ID NO: 72734 - protein, 38 aa, Homo sapiens
MGMGLNLGGLPCPRDCAHFLTGAILLPTVTAAPTKPAP

SEQ ID NO: 72735 - protein, 29 aa, Homo sapiens
MKQIYGLGSPFFFFFFFLIETSISLCCLG

SEQ ID NO: 72736 - protein, 92 aa, Homo sapiens
LFFLFLLMLLTGPAMLLHLETLLPAVAVPLQLLSALLESASVIPPVPAQRLSTAARWFYLPQRLWLQFWASKFWLLHIFPFVPPALEVVAAF

SEQ ID NO: 72737 - protein, 108 aa, Homo sapiens [sequence omitted]

SEQ ID NO: 72738 - protein, 66 aa, Homo sapiens
VRAPAGSGRRGDPRRAGGLAAVATCLVASAAVGSWGDGGAGAGLAVQESQPWPPPSRIWSIWHLCT

SEQ ID NO: 72739 - protein, 62 aa, Homo sapiens [sequence omitted]

SEQ ID NO: 72740 - protein, 106 aa, Homo sapiens
MSQSGSSLLFASALCYPSSRTSVLSGTMICDCHGKVLGRRRPAGSLKLTMEPGMKAALRMRIAFPGAKSANAVWLSELRGFTKSSRGGHLHSATCPTECRKYCLLR

SEQ ID NO: 72741 - protein, 47 aa, Homo sapiens [sequence omitted]

SEQ ID NO: 72742 - protein, 43 aa, Homo sapiens
LTYSCSRRALHASLSSSLLWVTFSAGDLRFSKGDMPATLALAP

SEQ ID NO: 72743 - protein, 111 aa, Homo sapiens
LQSAFSPAGPGLALRPAPCAAASSFCRRRPVLPGFLLCGGLTLCLWELEVDKGECRGVATGFFPVAAASRDAGSVGLLLATDLGHLPAASGQAMRPPSPATQRGRRVARRA

SEQ ID NO: 72744 - protein, 67 aa, Homo sapiens
LFSLSLFGCIALCNSVGLPLSGLFFFLDSCRLFIVVPKACRCGVKYIVQIPVSSASLMLELSPLTLC

SEQ ID NO: 72745 - protein, 36 aa, Homo sapiens
LTQTFTLAWAGCSGAASAHCNLHLPDSRILLPQLSE

SEQ ID NO: 72746 - protein, 1030 aa, Homo sapiens
VLDLRGKKKREGEREKEEQERSRKEEEVAKNQLPCWICLSQHLGEALGFFLKGLIFRTPHLSSLLPASSLLWWLGCFFHDFLNLDWAVLCVKPISCDLLLTEVESTASILASVKEQEAQFEKLTRALEEERRHVSAQLERVRVSPQDANPLMANGTLTRRHQNGRFVGDADLERQKFSDLKLNGPQDHSHLLYSTIPRMQEPGQIVETYTEEDPEGAMSVVSVETSDDGTTRRTETTVKKVVKTVTTRTVQPVAMGPDGLPVDASSVSNNYIQTLGRDFRKNGNGGPGPYVGQAGTATLPRNFHYPPDGYSRHYEDGYPGGSDNYGSLSRVTRIEERYRPSMEGYRAPSRQDVYGPQPQVRVGGSSVDLHRFHPEPYGLEDDQRSMGYDDLDYGMMSDYGTARRTGTPSDPRRRLRSYEDMIGEEVPSDQYYWAPLAQHERGSLASLDSLRKGGPPPPNWRQPELPEVIAMLGFRLDAVKSNAAAYLQHLCYRNDKVKTDVRKLKGIPVLVGLLDHPKKEVHLGACGALKNISFGRDQDNKIAIKNCDGVPALVRLLRKARDMDLTEVITGTLWNLSSHDSIKMEIVDHALHALTDEVIIPHSGWEREPNEDCKPRHIEWESVLTNTAGCLRNVSSERSEARRKLRECDGLVDALIFIVQAEIGQKDSDSKLVENCVCLLRNLSYQVHREIPQAERYQEAAPNVANNTGPHAASCFGAKKGKGKKPIEDPANDTVDFPKRTSPARGYELLFQPEVVRIYISLLKESKTPAILEASAGAIQNLCAGRWTYGRYIRSALRQEKALSAIADLLTNEHERVVKAASGALRNLAVDARNKELIGKHAIPNLVKNLPGGQQNSSWNFSEDTVISILNTINEVIAENLEAAKKLRETQGIEKLVLINKSGNRSEKEVRAAALVLQTIWGYKELRKPLEKEGWKKSDFQVNLNNASRSQSSHSYDDSTLPLIDRNQKSDKKPDREEIQMSNMGSNTKSLDNNYSTPNERGDHNRTLDRSGDLGDMEPLKGTTPLMQKI

SEQ ID NO: 72747 - protein, 29 aa, Homo sapiens
LVLQMLLGFIGAGPSRAGPLTLPAWLHSP

SEQ ID NO: 72748 - protein, 20 aa, Homo sapiens
LEPALSQRQNGWTDRPWRQH

SEQ ID NO: 72749 - protein, 58 aa, Homo sapiens
MKTGRLSPSPVAVCLGPPVACRTKVLFHHLRCASGSPGAGPHPRRCCCSEWFHCLDNP

SEQ ID NO: 72750 - protein, 77 aa, Homo sapiens
MSSVSSSLSGCCFSTALLFPPPFSPGRLTLRQRREPHPLSLRNHHGGWGKFAGSGGSGHPIHRHPLPEWGQSAPEEF

SEQ ID NO: 72751 - protein, 34 aa, Homo sapiens
MKQQLRVCCVSHFCILSPPSCNIIYLESTCPFVF

SEQ ID NO: 72752 - protein, 61 aa, Homo sapiens
LCSPRARVSLLRRRGLSATTSFLLSAPSPSLHPAIPTPPYLFPWSRRQSLLVCLRDSGLPP

SEQ ID NO: 72753 - protein, 67 aa, Homo sapiens
VLGRSHCAAHLVNLLSVLMASPRWGTAVCRIQGPLSACNSFPWMPQKQSRPPFLSYPFALLFTPAPL

SEQ ID NO: 72754 - protein, 66 aa, Homo sapiens
RRLPPPSRMVLLLAGLGPGSKPPLPPALELLLRVCHSGLPVAGREELLHRQGFSSRNPTDNLNLNL

SEQ ID NO: 72755 - protein, 51 aa, Homo sapiens
LTSASWQSTWSPSHVSISLCLALPLSPAVEASSIELSQCRNSPSRSSMPRT

SEQ ID NO: 72756 - protein, 26 aa, Homo sapiens
RKMLGNIYLTCSTARTLASCCYSCKY

SEQ ID NO: 72757 - protein, 35 aa, Homo sapiens
TGLLVAAHSLQPLHSTVQCWPCTLGLLPLPPWSCP

SEQ ID NO: 72758 - protein, 62 aa, Homo sapiens
MVMEKIPLFLKQMKLGKIFMVLFFDFMKMENSVMSHSRFACHCCRLIFLWVLWQKNRLSSKI

SEQ ID NO: 72759 - protein, 140 aa, Homo sapiens
LLTAAAGLRLSALGSAASAPLHSTSAPSDSLPSASTPPAPVRIVSQLLATRPVPGCFSISRPPLLEYFTPCIWGQGLEKGRVERPVEKKEARPAGGGGSADCGEETPRHPFWSSPLPPRPCAHSLAGELLSDQESKSGPG

SEQ ID NO: 72760 - protein, 57 aa, Homo sapiens
VPPPQPRRERGTPGLWAAAFAFSSLLRTPSAQEAPRDRRDECQRGPGDGTRSITLYL

SEQ ID NO: 72761 - protein, 33 aa, Homo sapiens
KSSLLCACTTPLPSFSTFSCICMPVLNTLPYSY

SEQ ID NO: 72762 - protein, 78 aa, Homo sapiens
MRRTTTSRRKGTRCGWWAWASSCLSSSWPSCLAMCWSSQPLPSSSVCRRSPTTSSLHWPVLIWSWAWQWCPLGPPIFL

SEQ ID NO: 72763 - protein, 51 aa, Homo sapiens
ILASCLAQFKLLSALEAAFQAIQLLARTFSEYSKDGILSLERCRGCRLRKT

SEQ ID NO: 72764 - protein, 38 aa, Homo sapiens
LRLATAFSPPGFAMFATAARSAIVMGMGGVEPPSPVSI

SEQ ID NO: 72765 - protein, 65 aa, Homo sapiens
IASFLLTTASTVRSPAEPGPGGESCLHGRAPRPHRRSRHHLSPSLVPAMGFVSSSALVTDLDTEY

SEQ ID NO: 72766 - protein, 68 aa, Homo sapiens
MFATQGHSCPQGLSDFLLLALLMSLHHPPSPLLQRGNNKGTEDSCIWEKSCQIQKFAIMYFYVFMPCD

SEQ ID NO: 72767 - protein, 68 aa, Homo sapiens
KTVYRVNLSVIMKKWQSSKKVVVMGRWRSTSPFVLWVTGCPPLLWGAHQQLRGEGQPCCTSTDIRSRQ

SEQ ID NO: 72768 - protein, 55 aa, Homo sapiens
KPHHFSRSIKTERMFPRLSKRKTTIFLLRLFLGLAGEAGVRGWNCVHKNCGYFNI

SEQ ID NO: 72769 - protein, 78 aa, Homo sapiens
IYWMSSAGRWNIARFSLAWYWLPFSRKCARAVWSWIQPPWLASLSLMSLPLCSLLWESSALLDMRLEGCLGLPTHKLC

SEQ ID NO: 72770 - protein, 57 aa, Homo sapiens
IPALVLLEGLSRQSSSCSASVCDSPPSTPMALSLGDSSSPRKEGGVAEDLQPWPRGA

SEQ ID NO: 72771 - protein, 40 aa, Homo sapiens
RSCLRCRLKSVKLMSSSLWTTTAVSTWTASLLRSRPSTRI

SEQ ID NO: 72772 - protein, 38 aa, Homo sapiens
INQDSGRQLLRKMLKGKHQGLVLIFESLRVVYFYSVNT

SEQ ID NO: 72773 - protein, 31 aa, Homo sapiens
LRCQVLPFLSSSQISPAMCADPAGRTTFLCH

SEQ ID NO: 72774 - protein, 36 aa, Homo sapiens
IKDRLMKLLKKHQCWLLCSRMWGMAYSPSLDIFEIS

SEQ ID NO: 72775 - protein, 47 aa, Homo sapiens
KQRGGRRSKQPLEDQHSRDYGGPSVFSVTGAMLTSVSWTHSDSGAFT

SEQ ID NO: 72776 - protein, 65 aa, Homo sapiens
RFWFHWKELKFMPRTENKKSYLFLKKKKKVFASSVLVFCTSVNLLALPSKSTAFFTFFYDQGKDH

SEQ ID NO: 72777 - protein, 66 aa, Homo sapiens
MFQLLSNLLGRKSHRIISVLMLPQLDCQLILIMEVLWGHRFTFAIEEEEISLHLQIWGFYMTGKKD

SEQ ID NO: 72778 - protein, 78 aa, Homo sapiens
MTRTWTSSPLSPWPLQHAPAAGAVLGTLLPVPSSRHYPPRLHLSNYDRDHSRLLNDTAGSWLPESLDLGHPQLVQPSG

SEQ ID NO: 72779 - protein, 83 aa, Homo sapiens
IFQDLIMKLSGISWTIITELSSQHCCCIKVQLPVSFPLKHAVVTRRPRSRTAYTALLGPGLWLLHTGELMMTREGPMSWSTQL

SEQ ID NO: 72780 - protein, 83 aa, Homo sapiens
RGGLAGARERMWWAGRTPGTCGWWLDPGPMGSLLWGSAGSPAAAQVSGEVPAECFSCPKLHQRFAKMGWGGGMRTGRASVQQG

SEQ ID NO: 72781 - protein, 63 aa, Homo sapiens
TRPSSWSLRTSPMRAFIWTCGTWTLWSLSDRSLGSSRICMGFAGSLKRPGRTKARTTFWGTWF

SEQ ID NO: 72782 - protein, 40 aa, Homo sapiens
TAAAPASLSAALQPPAPPRSSLALRRPHRRPRPHQPWRRW

SEQ ID NO: 72783 - protein, 47 aa, Homo sapiens
MFANKLPSQGKEMFLWPLPFLVTSLSSTLSNRHMTSLWRHGDGHLPG

SEQ ID NO: 72784 - protein, 48 aa, Homo sapiens
MIKMALGVMAFDGGAAGVHGQSPVPRNQGALTRLLCWTWPRTASSQGW

SEQ ID NO: 72785 - protein, 55 aa, Homo sapiens
VCVFLCWFFKEMGRRKKNSPPLSSISLPPSVLSTGPPSLFCSVLFCFATSPHSCL

SEQ ID NO: 72786 - protein, 61 aa, Homo sapiens
LAPLPSRPADAGGPASAVGSCVAGPGAAGGAAAASEALGLGPVPYRLERVHPAAHPQPAHG

SEQ ID NO: 72787 - protein, 43 aa, Homo sapiens
LSRGWLLLVQVLPPTPRISARLCHGGQRPPRVKKKNEPFQSGQ

SEQ ID NO: 72788 - protein, 78 aa, Homo sapiens
MLSPRGNGLYIAHFTLFRRHFIPALVLLEGLSRQSSSCSASVCDSPPSTPMALSLGDSSSPRKEGGVAEDLQPWPRGA

SEQ ID NO: 72789 - protein, 72 aa, Homo sapiens
MSRGRCFSGAITHSPPSASVVWTLSNGSGRSTANPPGSLGLWPRARQSLRRTYATSLRSMTWSSQPRRSSAW

SEQ ID NO: 72790 - protein, 44 aa, Homo sapiens
MGRRKKNSPPLSSISLPPSVLSTGPPSLFCSVLFCFATSPHSCL

SEQ ID NO: 72791 - protein, 35 aa, Homo sapiens
MKVPVGSSVLSSLGSSVRALLSVSFSLSSSLGDRL

SEQ ID NO: 72792 - protein, 91 aa, Homo sapiens
MSSWWKRGLRPSACSCCTAAWPRATSRAVSTTSPENCRHSSRAMAKPMPLLAPVTSATRLQDDMAERGARGTCVEGGPGFGPPGARPEEPS

SEQ ID NO: 72793 - protein, 96 aa, Homo sapiens [sequence omitted]

SEQ ID NO: 72794 - protein, 42 aa, Homo sapiens
KRLRLRFMAALPPLLGSVGSWGARSGPEPELASRAETCAPRL

SEQ ID NO: 72795 - protein, 33 aa, Homo sapiens
RLFRRICSLLCQFLMAAGSPWHVAASLLSLLSL

SEQ ID NO: 72796 - protein, 33 aa, Homo sapiens
ISDTSLSFSPLLLPPAHIASPLPPPSPAGLLAS

SEQ ID NO: 72797 - protein, 172 aa, Homo sapiens
VPRFAGAAAARRREAGLGRARSSEPRRAPRLSLLTAAAGLRLSALGSAASAPLHSTSAPSDSLPSASTPPAPVRIVSQLLATRPVPGCFSISRPPLLEYFTPCIWGQGLEKGRVERPVEKKEARPAGGGGSADCGEETPRHPFWSSPLPPRPCAHSLAGELLSDQESKSGPG

SEQ ID NO: 72798 - protein, 32 aa, Homo sapiens
KDCMCSLLCCILSSLTTVPSTQRALPVYLLSK

SEQ ID NO: 72799 - protein, 69 aa, Homo sapiens
IRAAAAAAAAAAAASAAEEDSAARAPPATSAAESHRHRPRASGQELPPPAPVPRPPAAPNPAPRARRHE

SEQ ID NO: 72800 - protein, 49 aa, Homo sapiens
LPSMLTHWASLAVIPTMTATSVGKAPPGPLPDASPSLRLPARRRPDPVG

SEQ ID NO: 72801 - protein, 50 aa, Homo sapiens
RRSCRRGVSSSGMGSTKPAMLLAWVWTGAPQRKPRPTSWPSCTRRWTRQR

SEQ ID NO: 72802 - protein, 23 aa, Homo sapiens
TRARSYVSAAAAAASVAAATSSP

SEQ ID NO: 72803 - protein, 45 aa, Homo sapiens
MVQGPVQTPALTIHRRKRRRRRRRRPSGGTQQALLPAPAVAASES

SEQ ID NO: 72804 - protein, 54 aa, Homo sapiens
VPRRARASSSPALLHSSLAPAAERRHAAQNPPKNGRHRRRCRRGTPGTAAAAPS

SEQ ID NO: 72805 - protein, 37 aa, Homo sapiens
MRRWACCSWSRCSCCPAPTDCPSTTASTTPTAPTTRT

SEQ ID NO: 72806 - protein, 50 aa, Homo sapiens
MTSRWRSRICGWRTMGVTAVRSLTGWRMKAVWWSWSCGDGAVCPHISPTC

SEQ ID NO: 72807 - protein, 49 aa, Homo sapiens
VGPGSSMSEGTALLLLQSLRFCSSAMPCGTTSCPSLGCGLKTTKDCPQW

SEQ ID NO: 72808 - protein, 41 aa, Homo sapiens
MSARPRSPAAQSSTRPSSAIVTCFSVPGLGPVLTSQQTCTE

SEQ ID NO: 72809 - protein, 30 aa, Homo sapiens
TARGPTCLPWLSMSLATPWAWATPQPPTPL

SEQ ID NO: 72810 - protein, 74 aa, Homo sapiens
TMGPSWMWMRMTLRRLMLPPATVWRIWPHWCTSMSPASCTPCASAMALACCTRMLAPACWFLAPVGPLLCTLRR

SEQ ID NO: 72811 - protein, 46 aa, Homo sapiens
RSKPSIMRATMIWRNRSSRRPWRRLLWPSVAQCPSSSWVKWTAAPS

SEQ ID NO: 72812 - protein, 81 aa, Homo sapiens
VLHPSRHSAVSCLGVAAAMARKALPPTHLGQSWFCSCCRDTELAISALRARTATGSPGSCRCTAGPLPCASALESCCCRVT

SEQ ID NO: 72813 - protein, 94 aa, Homo sapiens
MQTQAEALTAGMAGVATAAAGAWTQPQLRPVELPQRTRQVRAETPRLRPGGHECGRTYSPSACLSRPPWRRKSPMGPWHQMPSPTKGWLGRISQ

SEQ ID NO: 72814 - protein, 72 aa, Homo sapiens
MAQSGGAAFWGSALGLQTQGAEMLAAGPPTRARQPALPGELRGAEVPGEAAPGARALPDLGNRQSGAPGSKS

SEQ ID NO: 72815 - protein, 90 aa, Homo sapiens
MRLHWAVISVMSDSCQRQQQGDTKWRRLSSYPWRRRQRWRRRRHLLQAAAAVSQAAAAPPAGAVAVARSQVLISQLKMFFTRMQSFLLVK

SEQ ID NO: 72816 - protein, 47 aa, Homo sapiens
MAPNCPCLWHPLSLVPSIPTTACQSKPVPASRMVPAPAPRPPPPQVP

SEQ ID NO: 72817 - protein, 23 aa, Homo sapiens
MSRRFIFSLCFFLFQFILNAYFS

SEQ ID NO: 72818 - protein, 47 aa, Homo sapiens
MLSRGWLLLVQVLPPTPRISARLCHGGQRPPRWLTFSPTICFLLLKG

SEQ ID NO: 72819 - protein, 38 aa, Homo sapiens
MGDLSALLASPHPGLARAAIPHGNNRVETRSLLSGCSS

SEQ ID NO: 72820 - protein, 33 aa, Homo sapiens
MPVPWALSPRGKTCFLTPALVGLWRSAAGLFYL

SEQ ID NO: 72821 - protein, 48 aa, Homo sapiens
LSFGVRARMSRRLAAVCRMGRGIMIRMCGSRSPAGSVSVTLGLSSATT

SEQ ID NO: 72822 - protein, 45 aa, Homo sapiens
MRRVLIDLPTGASGLRHAGGAPAAASALGPRGSPVPGVVQSGSKQ

SEQ ID NO: 72823 - protein, 50 aa, Homo sapiens
MGWWLRQMMMKIGDDWPLVALGLPSPSGHGGRRELNLGPGYLPPVFPTSS

SEQ ID NO: 72824 - protein, 54 aa, Homo sapiens
MDPQRRFLVASLVAGVCIETLRGKAPRLGLGAWRRRLPPRSSSPGPEAPRLQSC

SEQ ID NO: 72825 - protein, 20 aa, Homo sapiens
VLRSAVLGSCVDSGLETLPA

SEQ ID NO: 72826 - protein, 79 aa, Homo sapiens
MKGLGQAGPSCLRSLLVAVACSSSLVVQIPRLTKRRNSFYLHPGPIIADPDVCRGENKRSKNRPCCEGPRGSARMKELE

SEQ ID NO: 72827 - protein, 45 aa, Homo sapiens
MKGLGQAGPSCLRSLLVAVACSSSLGKIKEAKTGPAVRDHEAVPG

SEQ ID NO: 72828 - protein, 44 aa, Homo sapiens
LLHQHCDWRLQHHSGLWEGPCFGFLLCVWLQRWLQLPHHPEEDS

SEQ ID NO: 72829 - protein, 30 aa, Homo sapiens
MLSTSSVKLSTLSPSPSLLGKSPPMPSCCS

SEQ ID NO: 72830 - protein, 24 aa, Homo sapiens
VWKNSSVCVCVCVCVCVCNLLGWG

SEQ ID NO: 72831 - protein, 40 aa, Homo sapiens
LRRKLSGGEEQRAGLGQCSPACILALMSSPATAKELQSAR

SEQ ID NO: 72832 - protein, 27 aa, Homo sapiens
LGQCSPACILALMSSPATAKELQSASR

SEQ ID NO: 72833 - protein, 26 aa, Homo sapiens
MPDPRRLLLLLLPVGSHFPPNLIIEW

SEQ ID NO: 72834 - protein, 44 aa, Homo sapiens
VLIQLSSFHELTLIYDCVSDLRCMLPVIAVALVSDSFAIAKYPL

SEQ ID NO: 72835 - protein, 54 aa, Homo sapiens
LSPILTRLFALPSPPTQGLPSSPPCNTAPRTMSVYLETARPIPFWVSSVPFSHR

SEQ ID NO: 72836 - protein, 28 aa, Homo sapiens
MARWGFLTVRLGLPPCPCQEFPTNPTTL

SEQ ID NO: 72837 - protein, 27 aa, Homo sapiens
MKQSTSFSSIVLTSLPFIQLDRHSHSL

SEQ ID NO: 72838 - protein, 72 aa, Homo sapiens
LTINLDSGCSNFKFFSSFSLQAFIWSLFESEDPENLDPLLALIPLGSVIWIEQMLRLPLHHILETALLYSKS

SEQ ID NO: 72839 - protein, 154 aa, Homo sapiens
MPRGTQRRPAQAACVRRCGAPWCGVALPLSLPTGRRAPCCQPEARRRLPPSRLRRRRRSVLWVECARSSSDGGHSTGGTRAIHPAAGEKRMAEVGETRVNQQEEVPGPRSYDGDPSWKSLLHPGHFKRRWRQTAGGCRPDSETPSFQSCSALRR

SEQ ID NO: 72840 - protein, 70 aa, Homo sapiens
LVHTSSVCVCVCVCVCVCVCKGRVGIDTATQLEVIVCILHCWSDLVYLCQTAAHEFCLNLEMLQVVMWCL

SEQ ID NO: 72841 - protein, 44 aa, Homo sapiens
MYTRTRTRAPVSRAVSLADTQALTSLSLPACRAATPKTQLRVPT

SEQ ID NO: 72842 - protein, 38 aa, Homo sapiens
LAVAMDTLCVAAMGAVLQQSQGISLLRVLCFIMKNNGR

SEQ ID NO: 72843 - protein, 61 aa, Homo sapiens
VPERAGLAAATAAAQAAGASLPRAALPALLPGRAAGMGRPREPERAQEPPPPPPASPLPRA

SEQ ID NO: 72844 - protein, 411 aa, Homo sapiens
VGGARAGPGSSRGEPGARRSAARPSSAPLPPFLGALALASPLAFAGGAQKDAQRQRLGERRFKPHVCVLGGQSPPALADPGSRPARAARVLKINLIGHRKRILASLGDRLHDDPPQKPPRSITLREPSGNHTPPQLSPSLSQSTYTTGGSLDVPHIIMQGDARRRRNENYFDDIPRSKLERQMAQTGDWGEPSITLRPPNEATASTPVQYWQHHPEKLIFQSCDYKAFYLGSMLIKELRGTESTQDACAKMRANCQKSTEQMKKVPTIILSVSYKGVKFIDATNKNIIAEHEIRNISCAAQDPEDLSTFAYITKDLKSNHHYCHVFTAFDVNLAYEIILTLGQAFEVAYQLALQARKGGHSSTLPESFENKPSKPIPKPRVSIRKSVDLLHASHTGQEPSERHTEEALRKF

SEQ ID NO: 72845 - protein, 26 aa, Homo sapiens
MDCSLLTCSAVSSLIYSQNKYICDQL

SEQ ID NO: 72846 - protein, 79 aa, Homo sapiens
LGLSGSWDGGCDLVVVLVTALVPTPPGWAAPFPKLLDGRPQVFPEMPQPVAGCTATGPREKLGGPGRPRGRVAASVQRL

SEQ ID NO: 72847 - protein, 31 aa, Homo sapiens
MPTSPHTLLISLSLPLSPRHVGHCCQRLPPP

SEQ ID NO: 72848 - protein, 61 aa, Homo sapiens
VDRRAGAAALVAVAEVAAASAAAAAATASGSGFWRRRRRARLRGADPGARSGLLGRRVRCL

SEQ ID NO: 72849 - protein, 76 aa, Homo sapiens
VDRRAGAAALVAVAEVAAASAAAAAATASGSGFWRRRRRARLRGADPGARSGLLGRRVWRQLCHPRLPGPQSQLWG

SEQ ID NO: 72850 - protein, 60 aa, Homo sapiens
LVAVAEVAAASAAAAAATASGSGFWRRRRRARLRGADPGARSGLLGRRVDGVLLHCPGWS

SEQ ID NO: 72851 - protein, 36 aa, Homo sapiens
MNVLLLALPLTHRVPQASPFTSSVSVSPFILLRQWT

SEQ ID NO: 72852 - protein, 25 aa, Homo sapiens
LVLGFLGVPSSFSQSSGSLACMVHL

SEQ ID NO: 72853 - protein, 26 aa, Homo sapiens
LVCFLWSSLLPPSAKMQGAGVLTINW

SEQ ID NO: 72854 - protein, 81 aa, Homo sapiens
VVPIRNAFWRGFPLFNRFLPLSFFVPCALEVTSGMYPGGSYIPLCKVPSWFGSGGGCHPTHRSPPCPRTSSEQAGWSEGAP

SEQ ID NO: 72855 - protein, 118 aa, Homo sapiens
MGTRAAWFLALPFTPLPSRRCYWWPTRVHWGVMPAAEGSHLCSLEASLGYWKAPCPGDKCLGSYSLLSGPLIQEPVTGGVGTLWYCGLCLELSVGPAEAGRPLKPLPCPAAPSPPLLP

SEQ ID NO: 72856 - protein, 25 aa, Homo sapiens
MALKTALSLCMPLSSSSCHHRLILR

SEQ ID NO: 72857 - protein, 87 aa, Homo sapiens
MATLAPILWAPGFAHQISSPLALHLLLYLQGLPDSHLPIIMDTAPGCAGLSGTIWSSSWNLGLVEWEWGRGLHWADLESTVIPSIWK

SEQ ID NO: 72858 - protein, 45 aa, Homo sapiens
LFLPSLRLQCLMGLPVGGSVFAVPGRSGEPWEEVLRRPSLGSPQD

SEQ ID NO: 72859 - protein, 36 aa, Homo sapiens
MTTTSYMCLLQIVRAGSAGCWPLKKKRGLAMLPRLI

SEQ ID NO: 72860 - protein, 52 aa, Homo sapiens
IGLLSGGRPTARSFFSALVRFLFGFLPASGATRVARQQPLGDLVLGSCPAWG

SEQ ID NO: 72861 - protein, 75 aa, Homo sapiens
MHLAPFTILPYPLCSFLLKSVLSAQEWDSPRKESTFLFWEAQTVHFGAGTNMCLVNLLENSHHLLPPSLYSEKPD

SEQ ID NO: 72862 - protein, 93 aa, Homo sapiens
MDPALRSPTPPGSLSTALPGLAPSSGLGEQGLGVVQPSQQEGLRPSRRKAQREGALIPSDPVFPHPPYPAGLGLRQGWPQFLLNRPGGSPSPA

SEQ ID NO: 72863 - protein, 44 aa, Homo sapiens
ICGTLGRSFAIGWWRRRRQNVCIVTPYSSNFRRFWVKQLSLVCK

SEQ ID NO: 72864 - protein, 35 aa, Homo sapiens
MFSCTIRLFTRKGKLFLFGISIQDILSLCKDRSRS

SEQ ID NO: 72865 - protein, 128 aa, Homo sapiens
IAALYEMPVPACWISSSLSLLASHHSVSCSNIFLNFNPDHIRVQAQVYFTQESSILSSTLWNFCLLPQQRFCGREYVQAGWPCWLLQFFSQTYMHPMKTAGKPWLLRYPSLLEQQILSTYQMTPQSPS

SEQ ID NO: 72866 - protein, 117 aa, Homo sapiens
IQPRMLQRSLFLLLLKTTGDHFGNLKKLWSLPYMTTKPMILRNSHCGATKSTACWTVLRFTGGESRTGMGMKDMYQAVIWWKNLQIIWKPMSGTIRVSAETKLKNFFWTQAKKEPSW

SEQ ID NO: 72867 - protein, 126 aa, Homo sapiens
LAPGLGFGRVKMCWPDGLMGCYTWVPSKRWTVLGRCVWSSLRMIRSFWFYGKTLALLPSLERNSSVVSVALRLWSLGTGWSAVRSVAMLITRTAMFPGLQPLERERAHPGYAASVSLRSPPRGEVP

SEQ ID NO: 72868 - protein, 39 aa, Homo sapiens
LSPEPPCCRRLLPLLAVSPSVPALCAPPSGPWMVLLQIL

SEQ ID NO: 72869 - protein, 28 aa, Homo sapiens
MFLSAGPIVPLLRNVSPVQGQRLKRLLY

SEQ ID NO: 72870 - protein, 48 aa, Homo sapiens
LLLGVVGAAVGRVAGSGGDSLGFRGLLFLVLLLSSLFPVWPWLTLKTL

SEQ ID NO: 72871 - protein, 18 aa, Homo sapiens
ITKVVFPGRGLSIALWMC

SEQ ID NO: 72872 - protein, 30 aa, Homo sapiens
VLMFLSAGPIVPLLRNVSPVQGQRLKRLLY

SEQ ID NO: 72873 - protein, 29 aa, Homo sapiens
MLKYRFPAGTMALSSVAQWSSSEDAKVRA

SEQ ID NO: 72874 - protein, 46 aa, Homo sapiens
IMDQILESNKFTKGFALLSWLGCSGMNMAHCSLDLLYSSNPPSSVS

SEQ ID NO: 72875 - protein, 49 aa, Homo sapiens
MCLSFTPPLSAATAAAAAAAAAAARIAAAPSLARRRYLLGQVRSSPEIL

SEQ ID NO: 72876 - protein, 25 aa, Homo sapiens
LRKMKCSFYLVPCLGSTLTLLETCQ

SEQ ID NO: 72877 - protein, 46 aa, Homo sapiens
MKSLLFISIVIIRQEANLRVSRRLSSPLLVINRPRAMAFRINLGRN

SEQ ID NO: 72878 - protein, 113 aa, Homo sapiens
RFSRPQLMPRLSLVVLLLSILDGAPGHHFRLSEYCKKQAQTSPKQSCHTWIGLFLIRKSSWSLLNLAATWNMISLVLNYFITNSAQILTCLMITKELEGCVSWWKRAVKIEFW

SEQ ID NO: 72879 - protein, 56 aa, Homo sapiens
LKRLGLSLLVHASSASGQQVTVMMSNAFAVMVDSGVGNLEMIHGFNMPSGFQGVST

SEQ ID NO: 72880 - protein, 72 aa, Homo sapiens
LEVLRAYKKARRHPPLCSGAALPAGCRHSGQCLLHLLGTSGAAAPAPGSERRVPEIPASLRPTVVRGESCKC

SEQ ID NO: 72881 - protein, 123 aa, Homo sapiens
MLRVPPRWSQGCWLPLASSSHTWWSSRPKPSGFGRASLAGFIPVVSSSGTRPWTGSGAEGVLWVGRRTHHHQGPKESSTLLTMTTPTAGSCLRRCAGPVVSQCGLWGWWAACDSRALRYRTAG

SEQ ID NO: 72882 - protein, 62 aa, Homo sapiens
TVPERAGLAAATAAAQAAGASLPRAALPALLPGRAAGMGRPREPERAQEPPPPPPASPLPRA

SEQ ID NO: 72883 - protein, 28 aa, Homo sapiens
MRKLRLEGEKQLPLAAWLLAAGCPWSSW

SEQ ID NO: 72884 - protein, 100 aa, Homo sapiens
VGSRAQTGAILPEAASRSWGRPGGRLKLFFCLFCSLGLGEDLEVWAPSSPLETAMVSSNHHHLTTLHGGCPLRAASAAALSSPLYLSAPEPQSSFRPRDR

SEQ ID NO: 72885 - protein, 127 aa, Homo sapiens
IVRAYMKFVMISLHMSRIDILSKKLWKSLGTMVQGCSVGFWKSSLHHIKMVLLMDMLTVWMEKLLSSVIVMIQKHKAVLFKMGRKKMQLIPYYSSIKCNPLKKNYMSLLLLKQHKSAGENTYFLVIN

SEQ ID NO: 72886 - protein, 66 aa, Homo sapiens
LSVFLHNYIFLPLSPPTHIFLFPFLSLGTLPHAPLPHPLFPFPSSHPSIPIFPQQLPALAGSPQLV

SEQ ID NO: 72887 - protein, 61 aa, Homo sapiens
KPFLLPPLPPLLLISAGTEVSSLVFQKSPLHTQPEGAIKTVGQPTSVHSKVLSKGSLLLGE

SEQ ID NO: 72888 - protein, 114 aa, Homo sapiens
MAAPRATMASTVARNATVPTGAGATASTGPASATQGSTAASATSPARRGPLGRAARRSASVCSPTRSPVTRGMAAAPARLASGASAVRQSVSWATLGRGAGRHAPAQWAWPVTP

SEQ ID NO: 72889 - protein, 52 aa, Homo sapiens
MRGPWSPQPGTLVLFSALAPPKQSPSMRWAQPSPTSCWPSWTSTTSASGCRS

SEQ ID NO: 72890 - protein, 34 aa, Homo sapiens
IPSLHRRIRKFVLSAWLSFSPTRTGVGWGEQVSF

SEQ ID NO: 72891 - protein, 38 aa, Homo sapiens
VFENRASATCMMWIGEMVCPPSHGMSLLCSGIFPSLGF

SEQ ID NO: 72892 - protein, 48 aa, Homo sapiens
ISPLLLKPRLFILPPAWAAGCSSGWAWSQEQGECAPGPPSRVPGPWCG

SEQ ID NO: 72893 - protein, 46 aa, Homo sapiens
MVPVNVLLPSCGCSTACSTTASQPSSGPCSGIDSISENSTQMLPSC

SEQ ID NO: 72894 - protein, 73 aa, Homo sapiens
LRKSIRAAAAAAAAAAAASAAEEDSAARAPPATSAAESHRHRPRASGQELPPPAPVPRPPAAPNPAPRARRHE

SEQ ID NO: 72895 - protein, 43 aa, Homo sapiens
KMAAALVVAVDGAAGPGTVGAAASRRMTQDGKRAAEPRRFPCL

SEQ ID NO: 72896 - protein, 78 aa, Homo sapiens
MKSTFIQGLLWKTSPKGEVLLCCPGWSAVVQSQPTAASASQVQAILLPQPPEQLGLQLLNRRLLRVSRNLPLCMVLLM

SEQ ID NO: 72897 - protein, 33 aa, Homo sapiens
MKTSMMSHLHLMTVSHWPATCSSLCLPDYNNSM

SEQ ID NO: 72898 - protein, 217 aa, Homo sapiens
MRWRRTRLIPIIWRSWKTTTTPVTAQKAASGAIVPTAALQVPTQPSCCRLLPHLLCPPPLLTRVLCILLRSPPNPASPPNRGEMRGHIKWQKTRFTRGKRRIVKNGDCIVAVCRLHSLALSLPPNLLFFLFKICASAVSPPGRIETLANTYPLHSFLSPCFGLVFWNERSLLFYKPLCISNVVSFRFLLDMLLKRELRVWTDCGTQTHTKTCLFSHP

SEQ ID NO: 72899 - protein, 12 aa, Homo sapiens
ILETNHTDEPMR

SEQ ID NO: 72900 - protein, 41 aa, Homo sapiens
RRRSAVGSVSARGCGGAGGSSLSGFSLGGGGGGSVDASSAS

SEQ ID NO: 72901 - protein, 45 aa, Homo sapiens
LSILQSLVPAAGAASPVAISAQHLCYSHVTPGDPGAGAGQGPAPS

SEQ ID NO: 72902 - protein, 29 aa, Homo sapiens
ITDLLVTPLLAAHAAGTGAAEKGAPSSGK

SEQ ID NO: 72903 - protein, 30 aa, Homo sapiens
LLWASTGAAAMALSSSAGVHPASWVPELPV

SEQ ID NO: 72904 - protein, 39 aa, Homo sapiens
LVPALGLRDCGLSPSGAAAMALSSSAGVHPASWVPELPV

SEQ ID NO: 72905 - protein, 144 aa, Homo sapiens
IPNLKPIAMFWQLQACILKISFGAIQSVFPATSWSWTISKLKCLLKYLIISTVPQSLSRDRKQSLISQLQEKSWEYRSWKTLLIATSQIPRVPMYSVLLKREWLKKKKMKKGMKNQPSLMGQGSQMHFPSSKQKIVITCFPRWT

SEQ ID NO: 72906 - protein, 39 aa, Homo sapiens
MTFLLTCPGTLFPEISPCSGKIATSLLTALQTTPVVLCP

SEQ ID NO: 72907 - protein, 50 aa, Homo sapiens
MKGMKSFETCLCLAMWDLTASLTSWSTSLLLKDSVSTSFVLVRQALANPR

SEQ ID NO: 72908 - protein, 49 aa, Homo sapiens
IERKRKKMSRRTSIRRNEENESFKLQSRSVLFRHKIISLILSPFAFASR

SEQ ID NO: 72909 - protein, 22 aa, Homo sapiens
MKRMKVLSCRAVLCFSGTKLYR

SEQ ID NO: 72910 - protein, 56 aa, Homo sapiens
MFLLKYQPSAAREAAVSAAVAAAASLPTVLLGDLHIMLRNSFQSTSTQDQLPMSTC

SEQ ID NO: 72911 - protein, 30 aa, Homo sapiens
MASFSSSNPLVNLFLFSTRSRSLLISKRRL

SEQ ID NO: 72912 - protein, 37 aa, Homo sapiens
RVIYGIMVPSLRLGKIPMKKIRARTALEIMILLMFAK

SEQ ID NO: 72913 - protein, 35 aa, Homo sapiens
LRAPAASPVLSLLWPSAGWVTENFPTVKNRASLDK

SEQ ID NO: 72914 - protein, 73 aa, Homo sapiens
MKSMLRDAKKNLDRQAFLGCTRSMMPASASGDNLKKFTIGRVRWLMPVMPALREAETDGSFEVRSSRPGWPTW

SEQ ID NO: 72915 - protein, 59 aa, Homo sapiens
RSSSSNPWRRGWRRRRLSKAVCMWCIAGHPRPLLSGGHRPWTQGPPWTAWTASAAPWAS

SEQ ID NO: 72916 - protein, 32 aa, Homo sapiens
MLRTMTTTSRSCWAWMTLWCSSTGRSTYRSTC

SEQ ID NO: 72917 - protein, 23 aa, Homo sapiens
IPNLLFCFISPLGVVRRSSPCYP

SEQ ID NO: 72918 - protein, 47 aa, Homo sapiens
RPPRSPSCAVIHGKLLIPKIMYFIKSTSVEVWILSSAGHQVLFVCTT

SEQ ID NO: 72919 - protein, 48 aa, Homo sapiens
MESSRFLWRMLFPAKRWRSPISAVRAPAMRTTSGSSLMLASTSLWNTP

SEQ ID NO: 72920 - protein, 47 aa, Homo sapiens
MKMMKCNTMKGKNGAVITSTTGLTIPWKLFTTRWTTLPQTFLTWRGG

SEQ ID NO: 72921 - protein, 45 aa, Homo sapiens
LRPLSESMSTVKKMRGLLRSRLLSSLLLKAPLRLHRRDPLEDFSS

SEQ ID NO: 72922 - protein, 49 aa, Homo sapiens
RAMGWTSLTSRSASSLCPSLPAALRSPTCTTYRRSRACSSPSTGTTTWY

SEQ ID NO: 72923 - protein, 33 aa, Homo sapiens
MERTMPQSERWRMFSFASSCGVPSQAAWLTSWF

SEQ ID NO: 72924 - protein, 38 aa, Homo sapiens
MSGGTSSVRCPKSWGTSLWSAWISPVTASPESQSPSAA

SEQ ID NO: 72925 - protein, 29 aa, Homo sapiens
LFQSWGTSLWSAWISPVTASPESQSPSAA

SEQ ID NO: 72926 - protein, 27 aa, Homo sapiens
MGTSTGCASPSLPATSLATQSSSRPLG

SEQ ID NO: 72927 - protein, 86 aa, Homo sapiens [sequence omitted]

SEQ ID NO: 72928 - protein, 63 aa, Homo sapiens
MASLAPAALLPPAPAGTTVLGPSPTKEQLRFPEVPGLAGGIVDASLTSLCMCPGCCAGRKNGG

SEQ ID NO: 72929 - protein, 59 aa, Homo sapiens
MMTALVTVPPSSPSTCMALASPTFIYPLSSCHHLAPEWAGHGGQHAVGLEWWKGRNRSQ

SEQ ID NO: 72930 - protein, 56 aa, Homo sapiens
MLERARGCALYAVRAFGAVGTACWSPSAAASVTRSPAVAAAAVFTGWTLSRSGMFQ

SEQ ID NO: 72931 - protein, 36 aa, Homo sapiens
VTVMARAAAWTASASATRASQAWTVASTPAPVTATT

SEQ ID NO: 72932 - protein, 85 aa, Homo sapiens
ILRTQIPHSPMAAWTLLQARQTSAKPNRPETTLAPPYPHWNAVMKTCAITEGCTMFSLLPGVRPQDKETGISMMVAETLSPRCRS

SEQ ID NO: 72933 - protein, 37 aa, Homo sapiens
MRGVERSPPPTLAISAVLLGPLKEAEAKMTFQIFQPF

SEQ ID NO: 72934 - protein, 80 aa, Homo sapiens
MRLKEAVLPCVCRPGGELLFVLLALPPHPLLHTQLSPAGVWSSPAGSWETHSDTGSVSRVSNNVHSIGKFTPKISKCPRK

SEQ ID NO: 72935 - protein, 49 aa, Homo sapiens
RACSLFSAGVAGSEGSWSAFCRSLWLHAHRLRGYLPCYLIPYHTTGPQP

SEQ ID NO: 72936 - protein, 36 aa, Homo sapiens
MMLLSGAMSLTWAFRIRCAWLVGVSLRRGYWRCRWR

SEQ ID NO: 72937 - protein, 28 aa, Homo sapiens
MNCIKKFLQMSSSWAGTLRAMTSQSTLC

SEQ ID NO: 72938 - protein, 58 aa, Homo sapiens
MLFTCVLAAPLPHTTPEPWGKTRMRSRPRRGRFLRTLSRHPRAKVPSRPSTFSHDTWT

SEQ ID NO: 72939 - protein, 29 aa, Homo sapiens
MPSRVVRRLLVMLSGKLSIPSPHPEFAAE

SEQ ID NO: 72940 - protein, 30 aa, Homo sapiens
LQLLGFLWLPSLLEPGLHPSNHVQGTCSWY

SEQ ID NO: 72941 - protein, 31 aa, Homo sapiens
MTELASTFLFMSTSLETATRMPWLLLPRSYR

SEQ ID NO: 72942 - protein, 30 aa, Homo sapiens
MTELASTFLFMSTSLETATRMPWLLLPRSA

SEQ ID NO: 72943 - protein, 25 aa, Homo sapiens
MGSTFSGLTGCGGQCSGPTSTWAAT

SEQ ID NO: 72944 - protein, 19 aa, Homo sapiens
MWTDSLPCTRLALMTMLIW

SEQ ID NO: 72945 - protein, 27 aa, Homo sapiens
RNSKNLGCPFLGPGGVVLLGQHSLGHL

SEQ ID NO: 72946 - protein, 44 aa, Homo sapiens
MEKLTLWLWLQRKMGPLCSSFLNGGSRARPSKKWQKPTDPWVQS

SEQ ID NO: 72947 - protein, 20 aa, Homo sapiens
IHPAQAQRSLCYQLDSNYGR

SEQ ID NO: 72948 - protein, 89 aa, Homo sapiens
MAAVMSTSLARSSTAVMAAGPTAAAAPMSTVSPAACSPTSNFSWSASSTGQPWHSRTSSWQSKITLSCAWPNAGPHLRACSMRTPTGTP

SEQ ID NO: 72949 - protein, 36 aa, Homo sapiens
MMAGPSKLCPLLRLCHIGPGAEGKQVLYNLGTVTPP

SEQ ID NO: 72950 - protein, 48 aa, Homo sapiens
LPSLRRPHLARIWNRPAGRAGARAHPGPAAPGALPGAGAAPGAAGPGP

SEQ ID NO: 72951 - protein, 70 aa, Homo sapiens
MTSLYLLCSCSKLLGAFGLFTVFKQSLTSAVTVGFLERSSARVRLRRCNYRVSGAASSWDSGGGNWYPWQ

SEQ ID NO: 72952 - protein, 25 aa, Homo sapiens
IARYVKRSLSLCVFIGTANGVGKRN

SEQ ID NO: 72953 - protein, 60 aa, Homo sapiens
IMTRSWLIVVSGVGTKAQMSVPFNRFWAPKRNTSALVRTGIKSPSVDRKRLCYMNVALVI

SEQ ID NO: 72954 - protein, 67 aa, Homo sapiens
MGGSSPRPCILKAAYLRACGLAAGTHPRGGAAIVSGAPAQAGRSSCFPLLCCLPGVPTWPRSVLPAP

SEQ ID NO: 72955 - protein, 25 aa, Homo sapiens
MLPKLISNFLAQVICLPSKVLGLQA

SEQ ID NO: 72956 - protein, 70 aa, Homo sapiens
RKRMAVLTFLSVESDSGTKWWFWNVCLKKTSFIIRSLQHFTTGRLMTRSLVLRFKVLLMLGLLIEVSEEL

SEQ ID NO: 72957 - protein, 37 aa, Homo sapiens
LAGNFGFGALPAATLIVRSPLPPVVSSLAFWLCHALL

SEQ ID NO: 72958 - protein, 24 aa, Homo sapiens
RMRTRRPPGVAAAGVLALCRSEVE

SEQ ID NO: 72959 - protein, 38 aa, Homo sapiens
MKFDFTLEMTLWMFGIGISAGQSRTILKVGRRVICQRY

SEQ ID NO: 72960 - protein, 95 aa, Homo sapiens
LSPRVGAARQGQPSTTGSPAVSRLTGRCCVGGAALAWVCMWVQPWEHCGSASQEPWRSRSLKTQWWHWWAPMPPCAAPSPLSLASAWHSSTSSGS

SEQ ID NO: 72961 - protein, 30 aa, Homo sapiens
LPTRTRTTGPGCAAGMCGWTAAGLLTMALA

SEQ ID NO: 72962 - protein, 36 aa, Homo sapiens
IMLGRYPMTWMAFVKGTGMCFLWISSSLCRAASCLS

SEQ ID NO: 72963 - protein, 41 aa, Homo sapiens
KRRLMRMLCHCVCLQISPGLGWVHPTTDKMKWTLRAEQHTT

SEQ ID NO: 72964 - protein, 44 aa, Homo sapiens
MPSPGSRLTKSLFWLLECIEASPLCTISACHHFRGVGVRGQSSG

SEQ ID NO: 72965 - protein, 41 aa, Homo sapiens
MTTYATLPIYLLVLHQSKARKRMVPLTHIHLRDEDWYLTIS

SEQ ID NO: 72966 - protein, 57 aa, Homo sapiens
KKLHKAREITAGGKSMMGSRVLRTGKLLEAAGAGPGSPALAVFAFGRGQSLLFQVPA

SEQ ID NO: 72967 - protein, 67 aa, Homo sapiens
KWYLPASARISKLCSLETFLKKRTVRLSFNALMKLLSRPLWSMPIQGLFLFLRTQLNLSCQQQTYSR

SEQ ID NO: 72968 - protein, 63 aa, Homo sapiens
TTMRSTLAASIPTISSQGSSGHPFTKDWIVLWKSVLYMGITPSSFRFTQKRGSTVMGNWAMNQ

SEQ ID NO: 72969 - protein, 50 aa, Homo sapiens
LPPGRILSGVFSTLSLLPVHSWVPLQHCHISLLMHLFPPCHSTWSLEQEA

SEQ ID NO: 72970 - protein, 25 aa, Homo sapiens
MARARAVAAVAGGGGASSSSPRRRR

SEQ ID NO: 72971 - protein, 53 aa, Homo sapiens
MNLLCIAPMFYSALMTSGRKMCCAMSPSLWRDSGSALTGPCWRHAAVTSTQES

SEQ ID NO: 72972 - protein, 69 aa, Homo sapiens
KRSSRRARTAAARRSTTTRGGAAASGCCSSASTSSASSWRASPSSSSRQAPSSLTTEGFTAMMRASSTH

SEQ ID NO: 72973 - protein, 63 aa, Homo sapiens
MGVWSEQDPNRSFIPAWFILLIWQTCPAESTQASSVSQIILGQQMNKKEDVLLSGVWLADLIT

SEQ ID NO: 72974 - protein, 53 aa, Homo sapiens
MMLMSLSEILSVLFLLHCTEPLRVECEVLIYVCLVELSYQEHIDALKDNPRRV

SEQ ID NO: 72975 - protein, 55 aa, Homo sapiens
MQISVFLPAAWLQLILAGEETSQLSQIGRKNMECVLPLTEHNQMNCPDSSLQTSS

SEQ ID NO: 72976 - protein, 28 aa, Homo sapiens
MNNSRRAALRAVTLTAKVSSFTAEPARL

SEQ ID NO: 72977 - protein, 74 aa, Homo sapiens
LKMKVPAHGPPLIASPSRPRAPRGARGRRGPAFAAVAAGAATEAAAAAAAAPAPLAPARRAAAAARGPPLPRLP

SEQ ID NO: 72978 - protein, 37 aa, Homo sapiens
TSVFLISALKASASPFWSSLASRSMRDTSPYEDLGRF

SEQ ID NO: 72979 - protein, 81 aa, Homo sapiens
MDDKTTRICHLLAKRKPPPPHPSSMPGHSWGQSDVAGVGMPKMKLGRMTQSGRRGLGLQVSALASVGPHSFASFAPCLSFL

SEQ ID NO: 72980 - protein, 127 aa, Homo sapiens
MLFLASFTATALITLAYKLPVVAPSSEEAIVLYFVEYYTKPYCRFGPVLVGLFLSIYMHQNHQENILRTKVLLSPEMQVLLGWSCSLVTLFAVAALAYMVDDSSASSLVAAALYQALHRTLWAAAVG

SEQ ID NO: 72981 - protein, 45 aa, Homo sapiens [sequence omitted]

SEQ ID NO: 72982 - protein, 58 aa, Homo sapiens
MRLEPPSLLVTLEVATLWGWPGLGQLQASPLEALNGMPWFWWLCWAGCLSPSILRLGW

SEQ ID NO: 72983 - protein, 68 aa, Homo sapiens
MTSTPMQPLQLLQDMLLLGAMATQSSSQSPQRHLGQLPPPLQQLLPLQHLASTSLSSCRQTECNRPAI

SEQ ID NO: 72984 - protein, 33 aa, Homo sapiens
MRGGTRFTLGLADLCTTGARALLRKAGFPLYLH

SEQ ID NO: 72985 - protein, 35 aa, Homo sapiens
MKEVPLPASLPGWAIAAASLITAFSAWTRRMKVPL

SEQ ID NO: 72986 - protein, 67 aa, Homo sapiens
MHFLRGLCVAGGVPGYTARGSNCQTPEPTGSRGSRVAGSRPGLPAHRGPDWLLLRATAPGSAAPRAA

SEQ ID NO: 72987 - protein, 32 aa, Homo sapiens
MNSGLLAAVSWAPGSLLLVENRGRLAKGPAAC

SEQ ID NO: 72988 - protein, 23 aa, Homo sapiens
MRTGATAAIALCSSVSWCTANAK

SEQ ID NO: 72989 - protein, 38 aa, Homo sapiens
MELVVSWRAAWRRPGGASTLSGAGMSLSSSLKKRRPKS

SEQ ID NO: 72990 - protein, 117 aa, Homo sapiens
LGSGLAGALLGGPAASRGVRGARGLAVAELQHQLPSAGARWPGDLAAPKRDPEGFALVGAAAGGHSRAGDSARLLLPLRAAHTTGAWAHSHFPATRSRRADAAASLAAGGRELHPEL

SEQ ID NO: 72991 - protein, 34 aa, Homo sapiens
LSGVHLLPVLSLPGAPAAVAVESPWKCRKRHSAS

SEQ ID NO: 72992 - protein, 48 aa, Homo sapiens
LLAAPRLPARRHLVLGFHCSRWAGRFSVIAAGGGGGVTSGQPRNPTIL

SEQ ID NO: 72993 - protein, 139 aa, Homo sapiens
LNSLLSLACSPEALAPQCWAYLAILCQPPGHPPSQWKLLPPLTMVFLALGSGDKTISFHSWTTLCTQSAASYLPSCTGSEPPDLDFALGSFLGTCCSLASLEGSTGLGVRRWSSGCCFPTLGPWACSVLCIRCFLPASP

SEQ ID NO: 72994 - protein, 74 aa, Homo sapiens
LRRSLESVSSGRTFDGILMCLLCLIFSKTLTPTQASVIAADQKPEHFGSRQLRTWDEAPRQDAVLPGDPEDKKL

SEQ ID NO: 72995 - protein, 33 aa, Homo sapiens
LPLIAWFSLQSPAAVVGSCAFGCNKYVDYSRIN

SEQ ID NO: 72996 - protein, 121 aa, Homo sapiens [sequence omitted]

SEQ ID NO: 72997 - protein, 97 aa, Homo sapiens [sequence omitted]

SEQ ID NO: 72998 - protein, 105 aa, Homo sapiens
MLKCPRIRSATHAGVVRSPGRQRWRLLGVLGSLPPRPAPARLALRNSLFGAADFLVVPHKSKAWGPGGSRKYRFEIPKYYRGNGSGRRWQVWGRPEVTRPVGHGA

SEQ ID NO: 72999 - protein, 56 aa, Homo sapiens
MPFLQPSFSITTLLRALQPVVLRLTAMPSSPATSERPFDATATGLAHFPHSQFLFL

SEQ ID NO: 73000 - protein, 85 aa, Homo sapiens
LPFRKAGFSSSLSFSLSATDFKAFSPLKCPDSCGSSQGNFHTKLGLCPQYRCFRMVTNHGCCFLPSSPVLPKELRISTWGSGPCG

SEQ ID NO: 73001 - protein, 54 aa, Homo sapiens
LLASLVGSSSWPRQTGGGSGPDCGAMAVVSSFAAAASLAESPASALGAPTASAG

SEQ ID NO: 73002 - protein, 103 aa, Homo sapiens
LRKCFGGLSIRSFGFSSLVALPATPLTPAFPPPSFDQRSAETLEVRKLDTHPDRTGVLRGVAGGFGLDEFPPKCRRSQARAQKQRMGKSMQHSVYLILTRGNH

SEQ ID NO: 73003 - protein, 42 aa, Homo sapiens
LTRSPTMRAHLLSWSFRSLFGDPVSLLAGCVQSPLGTVVGLV

SEQ ID NO: 73004 - protein, 148 aa, Homo sapiens
LEQRERPGSPGRVVRSVRGPRRAGQSDRTAGLVPRAQAVTFVPPQVRGSAPAPKITQGSPSVPAACESQGCSSPSEVISLPLWTRHLQEPSSQPPVPSSRAAVIVSAWKALGTMPGCSPLWPSQGPRSLCVSCSHCLQGLGQGLVQNI

SEQ ID NO: 73005 - protein, 28 aa, Homo sapiens
MGLPGVIPSCAAVLWSSIHLSSSALSPT

SEQ ID NO: 73006 - protein, 213 aa, Homo sapiens
MVSGRHGTTRRAAKRLRRSSVLPRRRRRPAAPSFPLPSPRAAPGDPAQHPAARLLPARPESYGDERRRRRPGDTAGVLYVSHRSEERKAAVSCGESRSLHCPRGARRLSRSKAGNGRQKRSQTPTGSGLPPRGSEQRSRASPARSCRHVPSCAARAPPCSESPVGAGLRPSPVPGPPPAPRCRTRRRPALGADNRRRASRRGCRRLRQTAAKA

SEQ ID NO: 73007 - protein, 104 aa, Homo sapiens
LTLLLPRVLSHLAAAAPVQTLTLPPKAQPSPNNPQPCTDVGCESLCLSKNQALLETFKQRLDNYFSRTERKLMHQKSLRNFWGPTINLQRPAFWTVLKTSQQEK

SEQ ID NO: 73008 - protein, 38 aa, Homo sapiens
LRVVVALGAVWSRSGPGLTAAWSVRHEEKPFFELLVVI

SEQ ID NO: 73009 - protein, 29 aa, Homo sapiens
LRVVVALGAVWSRSGPGLTAAWSVRHEEK

SEQ ID NO: 73010 - protein, 52 aa, Homo sapiens
LTSALEQPFGSWSASTAGQSPSQRARRGAAIRRPAPAPWLVFSAGASGGTWR

SEQ ID NO: 73011 - protein, 69 aa, Homo sapiens
MSRALQTQAAVSPASRAGTGPSASSPACLAPLARAANSSALTADMGRPVSQILATVSAVTLAGWGPGVL

SEQ ID NO: 73012 - protein, 100 aa, Homo sapiens
VQGPLAASSGPSSLPASPTPLGPEPPGSGGGCAEVRRPEPGSCRGSGWQQPCYRLDGAQDRAPRRGLGMGGGALSVLPVGACVWGAPLLWGLLRGVCGGV

SEQ ID NO: 73013 - protein, 76 aa, Homo sapiens
LGSAVSGVCAAPGSAIAALLAPGASAPDPSSFVCLPVSCVPGEDPAEPSLPPPLLLLSLGEPGQPLPRSPSDRRRP

SEQ ID NO: 73014 - protein, 38 aa, Homo sapiens
MWRGLCLSLQLELQVSPSLPCVLCSQRPSLCGPVTCRY

SEQ ID NO: 73015 - protein, 38 aa, Homo sapiens
LSLFSILAPTSGFFLRDGPSDAWANGNRHLGCSAHRVA

SEQ ID NO: 73016 - protein, 35 aa, Homo sapiens
LTSARRAEPRALSRYLRPARAATLCPAFAIFCWQR

SEQ ID NO: 73017 - protein, 53 aa, Homo sapiens
LVARSVLSFPVGDLCRKHAPPDHRSGQEASERKFVTALLMFSLVLLASGCAFW

SEQ ID NO: 73018 - protein, 79 aa, Homo sapiens
VRACVCVCVCVCVCVCGARVPRASRQSPGASPCCLPHPSSLQAPFLHPSRAPTVADRARTPLSRCGGRAGWHETKGARG

SEQ ID NO: 73019 - protein, 37 aa, Homo sapiens
MCAFKPLIVRCWILEAVMAQMHILAEDNQLSDFTSLF

SEQ ID NO: 73020 - protein, 26 aa, Homo sapiens
LGPPPPRQDGEAGHGVLRGEPDPKQG

SEQ ID NO: 73021 - protein, 55 aa, Homo sapiens
MDPPWRGSGASAGWLWASGGPLSPVPRPANAVPLGSGAATLLLASWHFRDWSLTV

SEQ ID NO: 73022 - protein, 35 aa, Homo sapiens
MRSLGPLAALPSCSLWTLFLYHNSSRGLKCDVHKS

SEQ ID NO: 73023 - protein, 66 aa, Homo sapiens
VGGASGASRGLVGGARRALPVSGRGMRGGAGAAVGEFCCCGGACTLTVGNSETSSHLPVGNLLATG

SEQ ID NO: 73024 - protein, 36 aa, Homo sapiens
MKKGFKAGCLRRGVTFLQILHAVHLCPRRTTAAHDS

SEQ ID NO: 73025 - protein, 94 aa, Homo sapiens
LLRPSKDSRVGWTLNFELLFYFLFSRTHFLPSGVGAKSVAAVINCAQLGKESQDLWGGWDQKFLSKFSGEGEGPSQKLEGSGLTEKETNVSNHF

SEQ ID NO: 73026 - protein, 53 aa, Homo sapiens
MSSLEVKLSEMGMNLCPTCLFTSTLITTLGQSQLQSRRCWRRMLHPWTEATVS

SEQ ID NO: 73027 - protein, 173 aa, Homo sapiens [sequence omitted]

SEQ ID NO: 73028 - protein, 45 aa, Homo sapiens
MALMKMTGMAGVSSFSRASAMTPVWVSQRAPAGTVWLRVRCAASK

SEQ ID NO: 73029 - protein, 56 aa, Homo sapiens
LMKMTGMAGVSSFSRASAMTPVWVSQRAPAGTVWLRVRCAARVAAAGEWVRLGQPA

SEQ ID NO: 73030 - protein, 76 aa, Homo sapiens
MPVVVFLCVLIHSKGSRCRMPLLLWGQTLLSLSVSISTVLPQHQSMHQGSTQAQLSPPPSSSLTFTKGWLSSPWVP

SEQ ID NO: 73031 - protein, 80 aa, Homo sapiens
MPPTVRRGCWARPGWSLGLAGAAQNCLLRKRCSPGPPLSPGLSKASEVLPSSRLDSSVICLRPHSRVQLETEKPARGRGR

SEQ ID NO: 73032 - protein, 44 aa, Homo sapiens
LKIRRCNKMFLAFPPAFFFFFDFALESQSFRIFFTILFKKSFTV

SEQ ID NO: 73033 - protein, 59 aa, Homo sapiens
MYSASILEARELGVARIRAVPKISLLLHRLKLTSCVCTLLPLLCPRSACCCLTPGPVLP

SEQ ID NO: 73034 - protein, 27 aa, Homo sapiens
LRRIAGLCTGQFLCLLPGSGVRVQEAI

SEQ ID NO: 73035 - protein, 133 aa, Homo sapiens
LSAVSVAWLSQENMLKHRAHARQCACRRPYQQESDNKELKYWLELAMTQQIKAGRLILVRWLTLAVSWNLTWGCLPEHLHMACPWSYLTSSLQWLGSKSSYPKRTRQKCMTFRILSHKSHRVTSTIPCWSRRT

SEQ ID NO: 73036 - protein, 43 aa, Homo sapiens
LGSGIRSAPAVVAAAAAAIAAGLPQAQGLCLKALCRAKLISGT

SEQ ID NO: 73037 - protein, 57 aa, Homo sapiens
LQSSVGFFPFLLLFITPPPFSPFSGLRVEPANFEEEVAKWEKRGVRVWGFFVFVFVF

SEQ ID NO: 73038 - protein, 59 aa, Homo sapiens
LLFYIFWEARKAFGKRITFPRFSDSRLFATALACGTLPGMHSLSIPNRATCNLCFCKRS

SEQ ID NO: 73039 - protein, 77 aa, Homo sapiens
LTCPVLVMISLLTEAVPQKQTCNRRNRSQCHPSAVVTSKKVSRHGQMSPGGQNHPQLRTTALNYGVSLCHPGWSTVA

SEQ ID NO: 73040 - protein, 76 aa, Homo sapiens
MRMAPLEILSCFWFPWQGLNCGVCGLLSRDGIHCGRRRHSSAPRIPQGAPRCLPSKSVLQLEGAGAVHGRGGHAPL

SEQ ID NO: 73041 - protein, 51 aa, Homo sapiens
VTLSTRARGSVRSGRFAVAGAWAAGCLTSLPLAHSDLCSDPGCHDSRNPYL

SEQ ID NO: 73042 - protein, 53 aa, Homo sapiens
LDQEMGMMMRLLPLKTVVFLPPVPQLLLLLRRSDLPLMVIPAPLRPPLPRRES

SEQ ID NO: 73043 - protein, 44 aa, Homo sapiens
VYFWRFSPVFSWTIYACPAPHRAILRSLWALSLSLFFFLEVAEW

SEQ ID NO: 73044 - protein, 98 aa, Homo sapiens
VTTTMAAAVVAAAVAAAVAAAVAAAVVAAVATVVAAEVTAAVSPPGDPAPAPPPATTVGAAEEMDINPGTLRRLLGCLTLTLSGRILNPSWVSSTGMP

SEQ ID NO: 73045 - protein, 88 aa, Homo sapiens
LVAGLCLSLLSPGWAPGVRSSRRASWAYSEIGHQPPFLLQTWSEPVFPPWDLKTVPSACTVDHSRATGQPVMVPRRSAVDPALWAALS

SEQ ID NO: 73046 - protein, 77 aa, Homo sapiens
LSGRWNGPCPLQPGPAGTTFMKSPANLFLTSVCHLSPKKAEGVGLFWGYCAKLMIWLDFYTWPNVLAPDMTFGLGAL

SEQ ID NO: 73047 - protein, 92 aa, Homo sapiens
LWCLWYHPTVWTGGLLRAPFLESLTRLRNIRLRITGNGSFAAQKQSLSPSSHILMAKQVEEKRKHDCRSDQFSLWIIFSVKCMDLSFPCSYI

SEQ ID NO: 73048 - protein, 36 aa, Homo sapiens
LERRAPLAPSASSPGAAATRAGFLLPCLPAVPLGTF

SEQ ID NO: 73049 - protein, 165 aa, Homo sapiens
MGMCFAAESDVQMFIAFLLCIFLICAALAAQEMENCHGNILMVISSGNLPTEKQDILTTALTMILHQADRLEVCPAFLGPEVTGELLWIPSKHQEPLCKLSSITNTSMDKCVFPMERPILMASPGTQTSGHLALWSVCYVLVMSPSKSVRKSTAPIDTPASILKK

SEQ ID NO: 73050 - protein, 44 aa, Homo sapiens
LPPVGGLAALGGTLLPRAEAAGPPGRGPPSRSPAHPSPDSSLQR

SEQ ID NO: 73051 - protein, 98 aa, Homo sapiens
MTSRCLAGAAGPPGHRPPSQAAKVEAAPVTWRRCTSPGWKTPRVSTSPGTASSGKPARKPFLALLSHGPLLLSMRAGLQSQVGPRPANWWRTTWLCSP

SEQ ID NO: 73052 - protein, 108 aa, Homo sapiens
LTRSIQPGAHMCLRGLCLVFAEAFLMEHPLASQAMASPDPLAAPVLPVMIGWGTCGLTRTSDPGASTKDTAGSGPHGAGEGHVQYLEGFLEGSRKAGEFPMYSIYVSF

SEQ ID NO: 73053 - protein, 81 aa, Homo sapiens [sequence omitted]

SEQ ID NO: 73054 - protein, 36 aa, Homo sapiens
LSLQSLACQKQKKFVIFRVQMLCLLSQKIVLLGREM

SEQ ID NO: 73055 - protein, 34 aa, Homo sapiens
MAQAIICGALSVVCPAGRAGVTSARNPDGPDRPR

SEQ ID NO: 73056 - protein, 30 aa, Homo sapiens
MRILLWAFWPIPAPQSCRDGTARIGLPGLG

SEQ ID NO: 73057 - protein, 345 aa, Homo sapiens
LAAGTAAGAAPGLRGARGLPLAAAAAAAANVPAARRAPGRPRLAGGASLPRDLRAPAALAPAGLRVLRGRRGLRRACYGPGRRLRPPTLRLVAAPAAGPRGCSALVGEPRSSPCAQRAAPRQGAEPEDEPAAGAAVRGLRAALLCRPAGGRVVVRARGRLGGRGPVGGAARGGDGQQRSQSLRLPLLPGGRLPAPATAAEAAGLSVLRAAGRRGGRGGAPGPPGALPPTLAPPSLSPCSAGTAGRGRLAPTPSAPQTPALLLRKCLLGAWWSETGHLSLRRNLQGTRGLPGSVQITRGRRVCERVTLKLSPSSTLLFPSHVYISLCSSSFSSSLQFLSYLPIWRQ

SEQ ID NO: 73058 - protein, 35 aa, Homo sapiens
MDTCPLCLSAGFCAAGSGHSTRPADSSCRLHHPLH

SEQ ID NO: 73059 - protein, 63 aa, Homo sapiens
VAKPIGAAVQTAAAAAAVWLGRCRRSTSRPLTASGWSPAFAACADETAKEIRIAWLVLVSIFG

SEQ ID NO: 73060 - protein, 81 aa, Homo sapiens
LRIITVSRFSPSSPRASFLSLVTGSQFWSDSASTYPSVASPLPSFHLTWWPFLGIPWVSPARRASTRHQGARPLPLPCHRI

SEQ ID NO: 73061 - protein, 100 aa, Homo sapiens
LCASGVCAWSFSAWICLFIALLVETPKPVHPAKTPRAACGSRTLHPFPGCPLQAREAIRACWLRPPLSQAWLSPLRGRSPATPRGAGIPGMQAHSAGLHP

SEQ ID NO: 73062 - protein, 97 aa, Homo sapiens
MWWPAGRPAPTAPPEKVSQGPTLMPESLSCQFPQLLLCLLFSASARFTVQAAKSQGLGLRVVRGGKWVAGRKEHQGGWGQASDEERDRGGMGTGCAS

SEQ ID NO: 73063 - protein, 34 aa, Homo sapiens
LRKKLKLTVDILCLSSAANRAVSRAATMMILAGS

SEQ ID NO: 73064 - protein, 62 aa, Homo sapiens
LPCSPCCISRQFLGRCSCRCHQSRRGIALLIHPAALSFPFPPIPSHFLLPFPASFASISPTP

SEQ ID NO: 73065 - protein, 89 aa, Homo sapiens
MQMRSVWPGTKRQTRRRRRWCPEGARCPSAAASAATRVSGWCTEPRAPSPTGARAAGPRPRGPACCPSTRPSAAPWRRISRPTQSCWRR

SEQ ID NO: 73066 - protein, 142 aa, Homo sapiens
VARAAAAAGTAPHPPFAFAFPLLPPLLPGGSLHPASLSLPAPAHLGTGTPPWRRRPGPARLKHLAGATRLVATALSAVVRGCRVGCDFGRPSGCGSLLPPARGLESGGPLSEGKTGEPGAPGDPEVPAPPPRGCEPTAEEVG

SEQ ID NO: 73067 - protein, 82 aa, Homo sapiens
LQHSLPVFPLPLASSSSATPFTCPRPPPSYNCTVPLKAFSDFLHLPSSLFSLSLYHPDSYPTPRMAPSGSLFSSSLSLELQP

SEQ ID NO: 73068 - protein, 286 aa, Homo sapiens
MGEWRGPCCPRGLGTLPLPTPTRAAAGRSSLRSSGPSVTLSRDAVIHGGGGGGRGRDKHGSGEVLNSVLLSCLSLGTFSPLGSVLDFAGCENLLTSESSVEPRLGLWSAYFLQSDCSCLRWSLSVPLWGTSALISALTAAVRAAGKWGAPSGGRVAVSLLISSVTFKLSLEATAAAGHVRRALGCWGKISSAGSRDRAGGRRGTAPRPRLGTWEGRAGALGPGARPSWDTREDGGGEEVGSAAGELGIMQMGKENLRPRPSAKSSLGICRYCGHVMEGSGKYGLIF

SEQ ID NO: 73069 - protein, 224 aa, Homo sapiens
LRRWSGEPGFSPPAPSFSSLFSFPLLSLRPPAAAPQERGRFPGCSPLLSLVCPLVFPRSAEGTGWRLGSVRGRGQERGLRACRRCPASRSAGAAGQPGPALRPSAVSRGRPGWGRVTLRPAPAWWGLRGAGPPRAQGVPRRCGSSVPLFAESWASKECSAGPRGGQQVPLAPPGLLWWEPTRTVASLRLQATLEHRRGGRSGLEGFTPQQSSEPNPGLRDPPGA

SEQ ID NO: 73070 - protein, 41 aa, Homo sapiens
LAGSGAVRLGVAGGASICVAAARGVPGLVLRRPPSGGSGCF

SEQ ID NO: 73071 - protein, 155 aa, Homo sapiens
LFPPLRRPRPGSRFAGDAARAPSGPGKSRGARARLRGGPLLLLPACACPSWLRAGAAWRAGGEVAGAFAGGAHLFARAPPRKVDREGEAGGRRGESGAQSSEGGGWLCGGWCTPQSRQSDPGWGRVHSAHLRDYRASGRHVWGVWTRLLRPASRC

SEQ ID NO: 73072 - protein, 221 aa, Homo sapiens
MMMRVGRHVYISQRQRASAILFMSWQESLSVTCRLWMWMTGHLCTGLQLQGRPNVSSHCWSWEWTATCGTSMRARPWPMPCTAVTRRVSNSSPKRAEQSLLDPLPPRAVGPRRRRDGSTCSTKYSAKTRKKSREPIRRIPAGTDTERRTPQKSMTSSPPLIASWVPTAKNSLVIRWLWLNLRRKPQTIQNISYQKRNRWPVRGFHQSERRVSHPSPWAITS

SEQ ID NO: 73073 - protein, 43 aa, Homo sapiens
LRALCPGHLAALHLPATSPPRPWAQEFCCSCWWPQLGMVRESQ

SEQ ID NO: 73074 - protein, 51 aa, Homo sapiens
VVFFFLFFFFFLIRGYGVLLCLPGWSAVTQSQLTVTSASWVQETLLPQPPW

SEQ ID NO: 73075 - protein, 51 aa, Homo sapiens
MRPAPHSVPLCATPCQALRAPGCCFLPSFPKDYQRQVAGPGGGSGGGLAMW

SEQ ID NO: 73076 - protein, 347 aa, Homo sapiens
MTAVWTATARPGPPRAPPPCSAACCCWGWPPAWAAEPRPEDAPRTRRPGVPGSRGGAGVRGRAVRRVRPEVLPGATQQGPPPGPRSRPHCPPPAAGAPWDSGPRACDLVSFFFCIIRRPVPFLSFSLSLFFFFFLAVSQRVGRNAARPTPRPASHHTYTHGTVADTPWPVPGSRAAADPDLQLPTIPVADLVLFSILYFSCNPPDPRPHRRPGDHGTHRLGEEERRKGWGAWKLRSVENYFCLYSLSPARGTGREHWSPRGPMVENPRSKEFAHCCLHGLFSFCVGDGGQVWGLQRNPQHSLKETVSLLGPPFPWAFLWIPAGSAPSPQAWLAEFSTPRPGCRCPTC

SEQ ID NO: 73077 - protein, 65 aa, Homo sapiens
LSSRGFPLLFLPPPAPVHLQMPSPGPLKSQSCPLFLLPPTSPCSPAAALPWSRVPGAAPCSPTSH

SEQ ID NO: 73078 - protein, 230 aa, Homo sapiens
LGEQYGKSCENLLTSESSVEPRLGLWSAYFLQSDCSCLRWSLSVPLWGTSALISALTAAVRAAGKWGAPSGGRVAVSLLISSVTFKLSLEATAAAGHVRRALGCWGKISSAGSRDRAGGRRGTAPRPRLGTWEGRAGALGPGARPSWDTREDGGGEEVGSAAGELGIMQMGKENLRPRPSAKSSLGICRYCGKLSVHLAGLVSVNQNLKRASRSLFPQWVKVIIACGLKA

SEQ ID NO: 73079 - protein, 57 aa, Homo sapiens
MQARKDAAVAAVTASWVVRHGLHCRGRQLDLSRGNDLTYLHCDPPCSAHCDLEPHAL

SEQ ID NO: 73080 - protein, 47 aa, Homo sapiens [sequence omitted]

SEQ ID NO: 73081 - protein, 69 aa, Homo sapiens
LAAVALASGGLGLCGASSVLQKGSSSSRPGRGCRRPGRSRGGLQPGLAPRGTGPAARRAHLSHSRLAAL

SEQ ID NO: 73082 - protein, 223 aa, Homo sapiens [sequence omitted]

SEQ ID NO: 73083 - protein, 62 aa, Homo sapiens
LQQLPQLRGRPDGMHAGQAAGQVLSGPAGAATALAALGLLPAEASPAHPQVPPAAPGNCQAF

SEQ ID NO: 73084 - protein, 88 aa, Homo sapiens
LKSLSTLTLVHLTGTLTSISKTWSLRTPCLQRLLISSRVLGIQGRGQPGWTGSWEGVSWQPPGQTDLPACQRQPVLPAPTRTSSQARC

SEQ ID NO: 73085 - protein, 44 aa, Homo sapiens
LLPSARPAALLFAVGAAPGAGPRAEPRRLQRRGPARRPGNFAES

SEQ ID NO: 73086 - protein, 44 aa, Homo sapiens
LLLVSVSCSAAAAVVTRKGTGRTVMVVAAAACAPLRKRILEIHL

SEQ ID NO: 73087 - protein, 39 aa, Homo sapiens
MKLMLRRKKKCFGLFSLCTLDLKKKKKRRAFSITKYRQY

SEQ ID NO: 73088 - protein, 29 aa, Homo sapiens
LKFYRHLEIKSLSLSVPMLSMILNYRQLP

SEQ ID NO: 73089 - protein, 37 aa, Homo sapiens
MGRAGKQKRIRVLFTLWRVSPRTVAWASPSSFVLCFL

SEQ ID NO: 73090 - protein, 76 aa, Homo sapiens
LLSALLCFSKAFQQQHEVGSLPPPVILIIFSLEVQELQAAGDRLLGTCVELCTGDWDCNPGDHCVSNGCGHECVAG

SEQ ID NO: 73091 - protein, 80 aa, Homo sapiens
LGATARASRCAPRAPGSMELPLRAARPAPRRARSLLCGQVIGLAVLRPQAAAAPQRWSPKSSSSTWEVTSCSPWMALCSP

SEQ ID NO: 73092 - protein, 118 aa, Homo sapiens
MRRRFPAPFQLCLPLTALSAHRFPVHQARDVGGGWGAARVGMKGPFSSTAGRTAATKARLDTLCLEPPLQLAFPPGTPLILTSLSFSSLPGSRQGPGAAVGEENLSQQPEGFNRSAEG

SEQ ID NO: 73093 - protein, 48 aa, Homo sapiens [sequence omitted]

SEQ ID NO: 73094 - protein, 97 aa, Homo sapiens
MFLERKNLKMGFLCLPRSSMRSSTVGILTLSSLQKKRILFIPSLVWLLLQTQRDQRRLKKVEKLRHKKRAVKMWATSLKPRRRMKKKERQPQKRRKK

SEQ ID NO: 73095 - protein, 47 aa, Homo sapiens
MRSSTVGILTLSSLQKKRILFIPSLVWLLLQTQRKKKERQPQKRRKK

SEQ ID NO: 73096 - protein, 74 aa, Homo sapiens
LGKGACAGSCVLLVLRIFSKLKAESQGPCVLPWYLLTFRECFPLPSTGTQRLDLLRTSEKDCPYHPHHSKTLEP

SEQ ID NO: 73097 - protein, 48 aa, Homo sapiens
LGKGACAGSCVLLVLRIFSKLKAESQGPCVLPWYLLTFRECFPLPSTG

SEQ ID NO: 73098 - protein, 49 aa, Homo sapiens
LGKGACAGSCVLLVLRIFSKLKAESQGPCVLPWYLLTFRECFPLPSTGS

SEQ ID NO: 73099 - protein, 92 aa, Homo sapiens
LRAWRWRSLRTRRRGQTCAGCLGLLGLLGQKLALGAAAGWESGAAVGPPGRVGGGGFVPRSPGFRLSPVLRMPIGMGEACLACGASQWPSSH

SEQ ID NO: 73100 - protein, 78 aa, Homo sapiens
MLQTLPAPSSMLCLCSASLMQRRKSGYPLRMMSTLNTPSILWRSTRTLKLLGIVMTPVPCHWMRAPALPTPCAGTIGL

SEQ ID NO: 73101 - protein, 62 aa, Homo sapiens
LAARGRRKLSSCTGGRVRAVGGSGACAVAMSVYAGGRGPAKLCPQAGPGRTPLPLHGSGRGQ

SEQ ID NO: 73102 - protein, 48 aa, Homo sapiens
LRGSGLSGSSSCFLARPMTIFARLHCTFSQVSSLSLMCDTSSWTRYFS

SEQ ID NO: 73103 - protein, 33 aa, Homo sapiens
VRHPPARKGLMRTGATAAIALCSSVSWCTANAK

SEQ ID NO: 73104 - protein, 58 aa, Homo sapiens
LPPTFQYLLICSMNENGKFPGLPSAQLSCLPPFASAAHASLSSVFCAWTLWAHPGHGG

SEQ ID NO: 73105 - protein, 145 aa, Homo sapiens [sequence omitted]

SEQ ID NO: 73106 - protein, 28 aa, Homo sapiens
MKASTVAAAPLLPVYGEQVSRGRELRRS

SEQ ID NO: 73107 - protein, 33 aa, Homo sapiens
LRVAWDAERDTRARSYVSAAAAAASVAAATSSP

SEQ ID NO: 73108 - protein, 50 aa, Homo sapiens
VAAATAVVTAATAAAGSHLSPVHPHLAAPPSSQQSPGRPAHARTAEPSAQ

SEQ ID NO: 73109 - protein, 128 aa, Homo sapiens
LPLAHTHGRLAAKFRLRSPLRDPAAVLGAVTLNFPSAVTHSPRSPSRPPARPPAPSRAPLPAFFEKAFYHQPPPQSNPHRTFAHPLHPNNNNNCKIENKSPNPGEKQPTPAAAAASASTASALGLQEG

SEQ ID NO: 73110 - protein, 95 aa, Homo sapiens
MHAHSASLWVAFFYRSPFLFFTTGPPPPTSSSPAGLPLLESTVDASRPNWLPLLLSPPLPFLSIECTLYNFSGIVIENKIFTIITGFFQVTSCRL

SEQ ID NO: 73111 - protein, 74 aa, Homo sapiens
MALKTALSLCMPLSSSSCHHRLILRWIPASSTTMCSEHVEEKKQLYLLVSFCLSSWTLTFSETQQSLQWSVGPP

SEQ ID NO: 73112 - protein, 46 aa, Homo sapiens
IDENGKFPGFPSAQLSCLPLLGPAAHSLLSSVFCAWTLWAHPGHGG

SEQ ID NO: 73113 - protein, 46 aa, Homo sapiens
RHSGQCLLHLLGTSGAAAPAPGSERRVPEIPASLRPTVVRGESCKC

SEQ ID NO: 73114 - protein, 43 aa, Homo sapiens
RAAAPAPPRPARTIAAAGRVGARGGLLGTGLAHPSHLPAPWDR

SEQ ID NO: 73115 - protein, 37 aa, Homo sapiens
KELVLGAPWFRRQPPASSSFCCCSWGLCLLPTPALCP

SEQ ID NO: 73116 - protein, 39 aa, Homo sapiens
VCMEGLAWVSMEGLAWVCMEGLAWVSMEGLAWVCTEGLV

SEQ ID NO: 73117 - protein, 56 aa, Homo sapiens
IPRHMPAAYSRFLSWCLLALGEEAKLWLPASRAKRVRPWIETVTSIGNAERGTTWL

SEQ ID NO: 73118 - protein, 67 aa, Homo sapiens
VGEREAFTHALVAAFCTCFSAQVSVQRNWLPRNPNCSFRVSSAILRVELGACRHFPNLGGPGLDFHE

SEQ ID NO: 73119 - protein, 33 aa, Homo sapiens
MHVSHTLATLAASALQSPSPRPLVGSLVHTGGK

SEQ ID NO: 73120 - protein, 28 aa, Homo sapiens
MYLQVTLHSSLAALDLVSSFVEWRHHTF

SEQ ID NO: 73121 - protein, 71 aa, Homo sapiens
MRSSTSCSSWTPASPPTTRSWVTSTTIMAAAAAVGAAGPQPQPQPLRAPVRSCCGSWSSGCRSPAPCAWPG

SEQ ID NO: 73122 - protein, 46 aa, Homo sapiens
MLTLSLQPWSPLSLAVLPACLETFNLYPSPLSPEASSSGVWLPLGG

SEQ ID NO: 73123 - protein, 67 aa, Homo sapiens
MWPSGPWPLLSVFPLPSWARHRSRMKRSSAWWRSLPLRITGARCLPSASSSSPSSSPCSSSLSATAS

SEQ ID NO: 73124 - protein, 79 aa, Homo sapiens
MSRPAAAAAAAAAALSFVSRAVWARAGVPGTPPPPSFPQDSSLLALGPNGARLPGGRSAHRARLPLLLPDHLVSTRNEI

SEQ ID NO: 73125 - protein, 45 aa, Homo sapiens
MLKYRFPAGTMALSSVAQWSSSEDAKIHEKTSRTSGRIFNGKSLG

SEQ ID NO: 73126 - protein, 44 aa, Homo sapiens
LRSGYAATAAATATPTVPGSVHISSQAAVAVPAAAAAAAAADML

SEQ ID NO: 73127 - protein, 53 aa, Homo sapiens
KFEINSKLPATLSLPLMCTPCKQAAAEHSRDALECENAKPQTENIQMLGSPYR

SEQ ID NO: 73128 - protein, 29 aa, Homo sapiens
IAFYDFFCACIHFLFRFVLFKAVAAATAA

SEQ ID NO: 73129 - protein, 35 aa, Homo sapiens [sequence omitted]

SEQ ID NO: 73130 - protein, 70 aa, Homo sapiens
LMVLGSALQLPSAKAQAGRCAAALLRAALSPSVAGWFFGGKLYPILVTPGNSLFVCYLMVSRLPCLVEPC

SEQ ID NO: 73131 - protein, 35 aa, Homo sapiens
RKEKRERDSERKRKMSLSLISLSFLFPAGAGRRSC

SEQ ID NO: 73132 - protein, 16 aa, Homo sapiens
VFRCIISSLNILLVRL

SEQ ID NO: 73133 - protein, 14 aa, Homo sapiens
IWDLGLLIFLTVVS

SEQ ID NO: 73134 - protein, 31 aa, Homo sapiens
MRELLLCLLMEVFTAQGFLILIQEIRSWYGD

SEQ ID NO: 73135 - protein, 37 aa, Homo sapiens
KLVAKGRRRGLSFRGSLPFLCCRSVTLALSPCLDHFL

SEQ ID NO: 73136 - protein, 29 aa, Homo sapiens
VWCPDRGAEVAAAAVAVALVVFQSPRLAL

SEQ ID NO: 73137 - protein, 23 aa, Homo sapiens
LPVLLLPALLPSLRRRAQQGPDA

SEQ ID NO: 73138 - protein, 54 aa, Homo sapiens
LLLPSSHFLVCSAAVWAWAMRQGRFPIRAPTCPQSLERDSNPASMSRSLQPPSS

SEQ ID NO: 73139 - protein, 53 aa, Homo sapiens
ILSSCWMSFTQKINSTWFLNFCTKISRNSWMPLLSLAFLFPSSRAICSSCSRA

SEQ ID NO: 73140 - protein, 69 aa, Homo sapiens
MSLGPRRARSAPTAVAAEAPVDAAELPQRRRHRLRHGQEQRLQQLLRLFGQQQRATAAPLRLGGASRRV

SEQ ID NO: 73141 - protein, 47 aa, Homo sapiens
MQIQGFRFCLGFPFLSFLFFFFLQGVRRELGVSTSLPFGSCGKSPCS

SEQ ID NO: 73142 - protein, 42 aa, Homo sapiens
MPVLHLSLQFHCVSLLLGILKSGTKLLHDPCTFASAYIIALL

SEQ ID NO: 73143 - protein, 53 aa, Homo sapiens
MNTVFPSTSTPWPPPSSRRCFRQIPLPAQPLTSCLMTSSLLLAISLPVSPSPA

SEQ ID NO: 73144 - protein, 73 aa, Homo sapiens
MGRLRPWLCVPLRVGAGLGPNSTAAGFSLISEPRRWQSGRPGQVNPRAAGAQAPTPAQRGRKGPPPAQRAQRP

SEQ ID NO: 73145 - protein, 52 aa, Homo sapiens
MPAAYSRFLSWCLLALGEEAKLWLPASRAKRVRPWIETVTSIGNAERGTTWL

SEQ ID NO: 73146 - protein, 85 aa, Homo sapiens
IDQSHLRVTLYPSLIPSETASTSPAASGFFMWLQMAGFPKGFWLKHIPWCICTAVSSSLQLCLNRSFTMLSSRFNSMAPNDEISF

SEQ ID NO: 73147 - protein, 96 aa, Homo sapiens
TRMQTQAEALTAGMAGVATAAAGAWTQPQLRPVELPQRTRQVRAETPRLRPGGHECGRTYSPSACLSRPPWRRKSPMGPWHQMPSPTKGWLGRISQ

SEQ ID NO: 73148 - protein, 28 aa, Homo sapiens
KVLHMIRKQLWKMTAFISLNILPYGTDQ

SEQ ID NO: 73149 - protein, 68 aa, Homo sapiens
MCVLAFLTTPLLCISFFHFLFQAFLFLPCGNSFGASDCSSSECAAIPVDPVPGACSKFSSVRPFAGLV

SEQ ID NO: 73150 - protein, 52 aa, Homo sapiens
ISLLPLGQACFTAGPASGASTDRGSEASQAPTRSPNAHALRSAPGGGRRSRR

SEQ ID NO: 73151 - protein, 42 aa, Homo sapiens
RRSKQPLEDQHSRDYGGPSVFSVTGAMLTSVSWTHSDSGAFT

SEQ ID NO: 73152 - protein, 37 aa, Homo sapiens
MTLSLCWASPCCWEPPGPWPSFLLASSCCPSCSSSPS

SEQ ID NO: 73153 - protein, 84 aa, Homo sapiens
RECSSDAVTWAGALGLASALVAARPALWSHGLPGRTPRLSPSRPQPPDDPLLPSLSPTVGLAEDGARPGPRGAAQVLGGREPGA

SEQ ID NO: 73154 - protein, 36 aa, Homo sapiens
MNLTGLSSALCGHSSATQSPREVQSPAAPRAPGPSQ

SEQ ID NO: 73155 - protein, 68 aa, Homo sapiens
LGAPHLRIGAQRPCGAPGGRKLMQPRAQGAVGVLRSAGDSGLAPSPPVAAQGRGLWGAGEASLIPPRN

SEQ ID NO: 73156 - protein, 81 aa, Homo sapiens
LVPSSSTPFSLGPMGTCTAWCEAATVSLSLRLPCSSARWPPPWRTVTSTVWSCVISSCVALSSLTVRGRSWCWRTWRTPAC

SEQ ID NO: 73157 - protein, 83 aa, Homo sapiens
KREQLGRGSPSSRSLERLKFTFQPLAPFAPLGLASEAVAVLGRRLGGAGCEQGLRATLLLATGFCCEVRPGNGGKKELREAVG

SEQ ID NO: 73158 - protein, 30 aa, Homo sapiens
MKTMLCSSALVSMRSLKFMGTELAATPMPL

SEQ ID NO: 73159 - protein, 40 aa, Homo sapiens
RIKRWSSELPWRHFFTLLWGFWFHVWRNPSSARQKYSKRK

SEQ ID NO: 73160 - protein, 131 aa, Homo sapiens
LLRMSEHRNEALGNYLEMRLKSSFLRGLGSWKSNPLRLGGWTILLTLTMGQGEPGGPQGDPWVPHELLLPSLCDSSHASSWGSGSITCAWRGGDSSSHPLVSGHILSNSPVAAVMCSSMGTHLSPFKGTLL

SEQ ID NO: 73161 - protein, 50 aa, Homo sapiens
KDIGGGLALKLLFKTRKRRRKRKKRKMLGNIYLTCSTARTLASCCYSCKY

SEQ ID NO: 73162 - protein, 57 aa, Homo sapiens
LGRWRLCRCMLHQLEASLLITAAGMPSWKPILQRGDTSFQRSGKLARPSLGWSIRMA

SEQ ID NO: 73163 - protein, 61 aa, Homo sapiens
RHSRKLGMWRTGLGASSWTCAPLPLHWNMSTKGSCSLPLPSPCSLPQPYPSYLTRRGKEGG

SEQ ID NO: 73164 - protein, 44 aa, Homo sapiens
KPGTKQPRSPVTALSLHMLLMVSSAPSCGLIQTVSSFTVYIFTL

SEQ ID NO: 73165 - protein, 31 aa, Homo sapiens
LRAVALAAATGSGGDRLCSRLGLLLLLRGHP

SEQ ID NO: 73166 - protein, 36 aa, Homo sapiens
RTHWMSSIVHSFLRLLQHPLRVSGAAELKEPKLGLK

SEQ ID NO: 73167 - protein, 12 aa, Homo sapiens
MTMILILERGCT

SEQ ID NO: 73168 - protein, 130 aa, Homo sapiens
MSLCSLLSPRSGFRCCCAAPPPPAQPHQEAQGGLVELLMHAAARKTLFNFPPAPSRASPGHRVACQPDRARKSGSWAVAQRRREQEEAGARAGAVDPLGLPLVSSISCVQHCNLAAGVQTGRPPASSTDC

SEQ ID NO: 73169 - protein, 23 aa, Homo sapiens
LGNRRAHLSWVLSSSVLGLEVAD

SEQ ID NO: 73170 - protein, 38 aa, Homo sapiens
VGRKKFLFLSAVLKCISQPENISDFNFCRVCPRIQSSI

SEQ ID NO: 73171 - protein, 43 aa, Homo sapiens
MLNTLLLISGLKSICLPLPRLRAVSLKIVASTKSVSKIAPQLL

SEQ ID NO: 73172 - protein, 50 aa, Homo sapiens
LLSHRVSIKRKIMQSCKMLISFLLLSFLTASRLTGYSKPSGAYLLFFSTS

SEQ ID NO: 73173 - protein, 46 aa, Homo sapiens
LRRYRKGRSRCFLGSQSFTETLAIPFGMFTGTPVLSCLSYASSTPY

SEQ ID NO: 73174 - protein, 84 aa, Homo sapiens
VAAAVCGVLLQTIDASVFAVPGGFTSESSETAKMAACPFLWEFHPRGVQNCCWPEYTCMRWLKTPVGLFMRMACAKRHPEISCC

SEQ ID NO: 73175 - protein, 58 aa, Homo sapiens
LKPFLALCLSATSLGANGHELRLSKVSSTLGLRSPWQSPRCLRYHGRNDHPGSGRSHG

SEQ ID NO: 73176 - protein, 156 aa, Homo sapiens
MLARIVSISGPRDPPASASQSAGIIGVSHRAQPLSFLIWSFVLVAQAGMQWRDLSSLQPLPPGFKRFSWFSLLSSWDYRNAPPHLATFVFLVEMGFLHVHQASLTLPTSDDPPASASQSAGITGVSHRAWPKPSSLSFCGCCCEICRTSSCLDSIF

SEQ ID NO: 73177 - protein, 45 aa, Homo sapiens
LGNTGRPPSLQNILKISQVWWLVLVVPATWEAEVGGWLESRSSLH

SEQ ID NO: 73178 - protein, 110 aa, Homo sapiens
MALLRAAAAAAPLPSRSASCRPPALASRPAAWPVRLRGWPGAPRPRAPHRPHPSPDLPSESRRHMGPREEKRACPSASPGGGAPTPGGTASCPAREVQGWRTPSPTPFLF

SEQ ID NO: 73179 - protein, 124 aa, Homo sapiens
MALLRAAAAAAPLPSRSASCRPPALASRPAAWPVRLRGWPGAPRPRAPHRPHPSPDLPSESRRHMGPREEKRACPKTTAWRRNDADSYPRDTCCNFAVVREDASWAALRSLRLPFEAREDLQPR

SEQ ID NO: 73180 - protein, 206 aa, Homo sapiens
LDHAQDGRRSLSGRCREGSVQAPQRPPASCPGERPPGSLGPRRGQPGALMWGSLTVLGLAVGFRAAEGATKASVCPAPLALTEPRDRASNPILQIWKLRAENPSPESNCHRISWRPCLSQPPRGARPAAGGTRRGRSCGHVSSAAPPRCPARTPGWPPSTSGTASAPGAWSTPAGWCRPPTASPTAPPGTASPWCWASTSSTARRT

SEQ ID NO: 73181 - protein, 31 aa, Homo sapiens
LCNLHSSISYLFGHCYTLAALPLSWGMCTAA

SEQ ID NO: 73182 - protein, 83 aa, Homo sapiens
VFSLPACLPLCVCERVCVRLLCTGKNTAHVLCMDVTDTLFSLIFEKQARCPAHHMTPSILLLSAHFIGGIHHTWYSQSTESMR

SEQ ID NO: 73183 - protein, 58 aa, Homo sapiens
LCPCRRVLRWRRAGIKPTTHPLKKIHLKLPPLPDRSSCIRSGAAPDMKCSRFLDIETL

SEQ ID NO: 73184 - protein, 37 aa, Homo sapiens
MSRVGVETGLLLAPAPGAGSDSRLSGWPEPEQSLGLE

SEQ ID NO: 73185 - protein, 87 aa, Homo sapiens
MGVLSSLMIALQRDGSRSLKKIFLDLKAVPNNISFSGYTSLYLLATEGHPAYFKVLAIRNKAAISIQSCRLKNPRSWHWQVLCLLRA

SEQ ID NO: 73186 - protein, 32 aa, Homo sapiens
LHMVLLTFWKVSLSSSGRISISLSNSHLPFSP

SEQ ID NO: 73187 - protein, 44 aa, Homo sapiens
MRPVVLLSVSLRRTEAHLPPCLLRPGLVTASAEEITTALELLVC

SEQ ID NO: 73188 - protein, 38 aa, Homo sapiens
MFGDGFPPLTLQALSFLAVSWSFQWQAAYFKWDLERIP

SEQ ID NO: 73189 - protein, 56 aa, Homo sapiens
VRAAGERARRLSRQRRAQSAFFRSRLAAVLVGSSGRRSGSALANRGQKKAGLTAFW

SEQ ID NO: 73190 - protein, 51 aa, Homo sapiens
VMVMEKIPLFLKQMKLGKIFMVLFFDFMKMENSVMSHSRCAVLCRWSRWIW

SEQ ID NO: 73191 - protein, 35 aa, Homo sapiens
MLLYPLFPILIFSPLLPFIRPRRRVGQWVRRKSIW

SEQ ID NO: 73192 - protein, 51 aa, Homo sapiens [sequence omitted]

SEQ ID NO: 73193 - protein, 25 aa, Homo sapiens
LILQLRMFLSPMVHFDCLIFVIKFL

SEQ ID NO: 73194 - protein, 14 aa, Homo sapiens
MFPRHSVLAFTSVL

SEQ ID NO: 73195 - protein, 68 aa, Homo sapiens
MTLLNWKLRLPLGHFGLLMPGSTGQGGSYSVGCMADLTTKGKLDYCSTMEILSGLFHGSGTTSSFPTS

SEQ ID NO: 73196 - protein, 56 aa, Homo sapiens
KDKCVCLKMASFGLAWWLTSIIPALWEAESKCTVLVKSAVAYSNVQGFHIHSPLAH

SEQ ID NO: 73197 - protein, 20 aa, Homo sapiens
IGIDFFILFCLLGRTWLQGF

SEQ ID NO: 73198 - protein, 61 aa, Homo sapiens
MKRIRTLTFLAVHFPPVKVMVQFSIHIHIRGLACCTSKKPDCCSLLRTGMQQSGRGCLILS

SEQ ID NO: 73199 - protein, 54 aa, Homo sapiens [sequence omitted]

SEQ ID NO: 73200 - protein, 64 aa, Homo sapiens
KSMPSLSRMFSGCGIKMLPAIYCLLSTRQITLCSGMPTLAPNYGRRAMQITFFLFLLTLLIPHI

SEQ ID NO: 73201 - protein, 41 aa, Homo sapiens
ITFSTRRLKRTGLFSRTQIPLMVLSSSLTSSGTNSSSMTCT

SEQ ID NO: 73202 - protein, 55 aa, Homo sapiens
LCAPRSPRTPLAAGCPAWLAPCCPRAAPACSRPTCCWCWCSCPLLAATAPQAPGF

SEQ ID NO: 73203 - protein, 37 aa, Homo sapiens
LRTHWMSSIVHSFLRLLQHPLRVSGAAELKEPKLGLK

SEQ ID NO: 73204 - protein, 76 aa, Homo sapiens
RTFLSPSTATLMNGRYGRAALTQFCTLTCGGGQTSCWWLLLMPTLWGRWPVASVTTCLPASCGPGTAASPCSSARP

SEQ ID NO: 73205 - protein, 67 aa, Homo sapiens
MTPMPTAMVQVAMSPTGMSLEAHLSGAHTAPPQATARTQPCWRPLRAARAQTLRAHPHPAVPLPTAS

SEQ ID NO: 73206 - protein, 41 aa, Homo sapiens
VARVSSALRSRPLALLPSAPASLRVSRSSSSPTRPVPHGSG

SEQ ID NO: 73207 - protein, 32 aa, Homo sapiens
VAGAAAASGLGLLGRLLPGEQLRPCRLKNGRI

SEQ ID NO: 73208 - protein, 90 aa, Homo sapiens
KMKLGGHSWICLLHFQLCSTSQRFLKNEDISALSSGGEVCLASASTLLLFTRCMHALSESGLCFPSRRDHPPRLAWDIFTSRHCIFLFAI

SEQ ID NO: 73209 - protein, 39 aa, Homo sapiens
LTLSSLQKKRILFIPSLVWLLLQTQRKKKERQPQKRRKK

SEQ ID NO: 73210 - protein, 11 aa, Homo sapiens
IYNATLLFLVS

SEQ ID NO: 73211 - protein, 7 aa, Homo sapiens
LAAFLLL

SEQ ID NO: 73212 - protein, 17 aa, Homo sapiens
IFSALFMCGFLSPLPWS

SEQ ID NO: 73213 - protein, 32 aa, Homo sapiens
MYSRKRILLFGRMEKLGIIFSPLIIRPLSTVA

SEQ ID NO: 73214 - protein, 163 aa, Homo sapiens
LRELPPGGREVQLLLGLCSPPRVSLASFPKAAQSWYEVRVGGSRPAWLLTATPGLVSRSLASITHPHQKLAAAATARAGGSSPRLDLQNLSFASKPSFQLGEGEEGAVAAVLLALSPFLSFSFCVQVTLHGILFFWDFVIFSNMSWDLRSCNGDAKDTVSGLS

SEQ ID NO: 73215 - protein, 38 aa, Homo sapiens
MRSQSSFFCFSPTSSRTQHAALPPQPQCAFLRALRRAP

SEQ ID NO: 73216 - protein, 82 aa, Homo sapiens
LLVLAPGSQCILSLLILAGSQGHVLPSHFTDAETEALRRMISDHTVFQVAKPGLEPGLLTYNLAERGTTTMSPCPWLHPVPI

SEQ ID NO: 73217 - protein, 41 aa, Homo sapiens
LMDGKKSNSVTLWLTATSATLTHLLKRQEEERAASPVLGTT

SEQ ID NO: 73218 - protein, 66 aa, Homo sapiens
MHSFSAVSGLVSLSLEARNMQTAPRSCRWDFGVGTPAKKRSRRIYHKTNRLLLISTCAVCLSSSGH

SEQ ID NO: 73219 - protein, 43 aa, Homo sapiens
MNLQQAAFMVLPSPSSVSNCAGKHYASPGPLLSGTKRSGFQSH

SEQ ID NO: 73220 - protein, 29 aa, Homo sapiens
LPMGKSGVVRLFCLLLLKHKKESWILPSP

SEQ ID NO: 73221 - protein, 72 aa, Homo sapiens
LDLNLLFLLLLFFLFFFLPPTKGVPNYPGLFLPCCVSISSLLPSVCFFLHQWGPSCSPSLPNFDPSPLLAKS

SEQ ID NO: 73222 - protein, 31 aa, Homo sapiens
MSDSSPQNRLSAFTIQSLSLVLPIRPAIGDL

SEQ ID NO: 73223 - protein, 42 aa, Homo sapiens
LLLGLPDLLLSLLALLSVPYSLGFRTFHFFLSLSLFPQKLEM

SEQ ID NO: 73224 - protein, 53 aa, Homo sapiens
LRWSRAEAVCLGEFSSIHLSPTLGSLFFLQLHQSNLSLPMPRSTVATTSVALK

SEQ ID NO: 73225 - protein, 54 aa, Homo sapiens
LDSKMMATLAPILWAPGFAHQISSPLALHLLLYLQGLPDSHLPIIMDTAPGCAG

SEQ ID NO: 73226 - protein, 49 aa, Homo sapiens
LMKTWTIEWSRNSPLSLTITVAFLWSSSSPRIPKTAAEFIKIKFVNVTT

SEQ ID NO: 73227 - protein, 71 aa, Homo sapiens
MSSLFLSPPNQSYTARFLKQSQLQSLISPLLLLLLSSLLLICIFSLVKLPSLCSLFSVFSLERYSCKSELI

SEQ ID NO: 73228 - protein, 53 aa, Homo sapiens
LNTLVLSFIHGGSPPPTWGAEGNLPSQFTYQKFLCRNMIVPSVGHHLWSSLSF

SEQ ID NO: 73229 - protein, 37 aa, Homo sapiens
MHFLLSVTCGQLATSTVLDTFKLPRGEDRKLGHPVWD

SEQ ID NO: 73230 - protein, 58 aa, Homo sapiens
MHPPLSPPLPPGRILSGVFSTLSLLPVHSWVPLQHCHISLLMHLFPPCHSTWSLEQEA

SEQ ID NO: 73231 - protein, 22 aa, Homo sapiens
MRGARLALAASGRAAPDFTGSS

SEQ ID NO: 73232 - protein, 46 aa, Homo sapiens
LQNSLSLFFFKRWGLALLPRLKCSGMIVTHCILELLGSSNPPASIC

SEQ ID NO: 73233 - protein, 168 aa, Homo sapiens
LTFSSSLPLQTLLPLCESQPCMPTPVEPGDRSCEPLALSWTGWACDAISPVSSPPPKGLPSWGGGTVGPVLSCFYRKSCSRECEVVQVGAEALMASCFLPTTWPVPTQPLRWHIWRAGVEGPPPHMPFWGEALWLPHSPWMGVAPLSPNHSIHPIQETNMVAILHKKR

SEQ ID NO: 73234 - protein, 41 aa, Homo sapiens
VEALWCPLLPGALPASLPITMPQPQPGPLQCLGLFQSSRAI

SEQ ID NO: 73235 - protein, 41 aa, Homo sapiens
MRLVSPGFWWVLPLRLGEALPGRRRQQPPGAMKTLRLREVK

SEQ ID NO: 73236 - protein, 35 aa, Homo sapiens
MTLFIASPNSVLTTVLLQMGQQVRGSQADFQHHRE

SEQ ID NO: 73237 - protein, 27 aa, Homo sapiens
LPAFFCFKILSMTSLFRPASTIQLPTI

SEQ ID NO: 73238 - protein, 61 aa, Homo sapiens
LITSGFVSSRAMLSFSSFFLFPPSLLSFPLSPPLPSAPLPTTFPLSTFSSTHCLSAGGVDI

SEQ ID NO: 73239 - protein, 43 aa, Homo sapiens
MRLHLPRPKRVMAAGYLGGASCWTMPHCQETGAGRFSDKISLS

SEQ ID NO: 73240 - protein, 57 aa, Homo sapiens
MHMWLWSFCGGNLLQFRLSGQANPNSFRTGSQRLLTERHMPPHGPMGMLIFSVHIGT

SEQ ID NO: 73241 - protein, 73 aa, Homo sapiens
LHLPVILHLLLCLHLLLLPHPFLQPVYCFLPPHLFFPLLRLPVLLLHPYLLHLSLFFPLLCIHLPLQVCLQLI

SEQ ID NO: 73242 - protein, 43 aa, Homo sapiens
LKRLGLSLLVHASSASGQQVYKGGKRLLLDFFFSFFYKSKLPP

SEQ ID NO: 73243 - protein, 69 aa, Homo sapiens
MRRRSCRCVCFNLSLVPYCGSCCGFDHVVTLGRSPACIGLLTARKPHFYLPDFYFGKFRFKRICRTLYR

SEQ ID NO: 73244 - protein, 30 aa, Homo sapiens
MTSHWPAQTCLCLSFLSSKLHKTAYIRGWL

SEQ ID NO: 73245 - protein, 35 aa, Homo sapiens
MTSHWPAQTCLCLSFLSSVSTGYVSHCQIPDHKSP

SEQ ID NO: 73246 - protein, 43 aa, Homo sapiens
MVTAPGQLLPVPPASAQLLTRKHHCLGPSLPAAPITSTVSSLG

SEQ ID NO: 73247 - protein, 75 aa, Homo sapiens
VSPTLSPLTPFLHLMMQLTLASPLQPAVLPTSRDVCVCVCVCDCVCLLTVVFVATCLWMVLCLLVNCGLAFPGRG

SEQ ID NO: 73248 - protein, 60 aa, Homo sapiens
MVRLRDAALPCPALSAPAPLKFSIQWRALAGWPSGRAVPGCSLTLANLDLRLTCCGSGRG

SEQ ID NO: 73249 - protein, 58 aa, Homo sapiens
VQKWHLERGRKRRKNRSSASDLRWLKERMYLVSAISLHPSMTLLSMSLIFLARKPSAV

SEQ ID NO: 73250 - protein, 26 aa, Homo sapiens
MHVTTSLSFVFPTFQMGCSGPCCLPE

SEQ ID NO: 73251 - protein, 72 aa, Homo sapiens
MFLKLSAKLIYLSIPSWSESQTSARHGRLCRHSSGKKRELPSPSSRCSPAGPPSPGRSAPLPSSFHFCRLRN

SEQ ID NO: 73252 - protein, 102 aa, Homo sapiens
LLTSVLFGRAPSTHLWIHLGALGTMGWWNGCSEILEEWCPHFADTPATLTALPIVLPTYLLPQSLAGEGRWPGAISLQRRGSCFDYHLHLTGQALTLPFIQV

SEQ ID NO: 73253 - protein, 35 aa, Homo sapiens
RSSLIVPGAVTTVGPSAQSAQPLSVLPNPHNRPRL

SEQ ID NO: 73254 - protein, 65 aa, Homo sapiens
IEKMEQDAHYCLVLLPLSRLAVGLMPVRRSRLAAKLSWSQAVTLDLGSHWPSICIQKASLCLLAA

SEQ ID NO: 73255 - protein, 38 aa, Homo sapiens
TRMMRTLRCVTMTMMGCFPSLESVTWGKQGGPGKRMKN

SEQ ID NO: 73256 - protein, 49 aa, Homo sapiens
VFPALAAGASQESGRWALVLSVASEAGAAVAAPFWCSDTAEEPGPGTAG

SEQ ID NO: 73257 - protein, 49 aa, Homo sapiens
ILAIGARACEPVGVAAAGTIGLSRGRHVAFRGAFMGLSGMGFLFLIVNR

SEQ ID NO: 73258 - protein, 23 aa, Homo sapiens
LAVSVACVALAPRSSISGADVWA

SEQ ID NO: 73259 - protein, 99 aa, Homo sapiens
TRRTSRTSTAPAARAMALAAGAAWATTWPRRTTGTGTCCWTRPGRSSSARPSRHGATPTCGRQAHRSRTLMRTSETGSSSCCSWRSYQGSGYLSRSGGR

SEQ ID NO: 73260 - protein, 43 aa, Homo sapiens
LLYSALSARAAAASASALRCAPGPCCHGLPPAKPAEASEPLRR

SEQ ID NO: 73261 - protein, 39 aa, Homo sapiens
VTRMMRTLRCVTMTMMGCFPSLESVTWGKQGGPGKRMKN

SEQ ID NO: 73262 - protein, 26 aa, Homo sapiens
LPWLLLTVSTSCTGKSPGLAIAIWKL

SEQ ID NO: 73263 - protein, 70 aa, Homo sapiens
KTKMTERTLAKIFQLHCLTLFYFSDTSPTLIEPVACNLVSQLCLFFLMYLFQTFLPLSTCIIRLEMGMRV

SEQ ID NO: 73264 - protein, 50 aa, Homo sapiens
MKMCVSLSAQCPERQSAAVWASSPSSSPWAATASSSSSPHPTISVPSTTS

SEQ ID NO: 73265 - protein, 50 aa, Homo sapiens
VGIKRRKAALLELCGLLQVRVAGNRTTLLLEEKEEFIFSRHKKSSFFFRC

SEQ ID NO: 73266 - protein, 26 aa, Homo sapiens
MRAARLAPLLLTHARLRAGQRSSSPL

SEQ ID NO: 73267 - protein, 53 aa, Homo sapiens
ISGLAKGAVAAAAAAAAAATARKSLPGGEQDRTKPECRRQRIRSQSSCGQVYE

SEQ ID NO: 73268 - protein, 52 aa, Homo sapiens
RPRSRGPWMCLDGKMARRHRRRHSSIALGKGLLCLWARPTATSLLFLTTRWW

SEQ ID NO: 73269 - protein, 35 aa, Homo sapiens
LNRKRFRTWMRRFVAASGVWRGSGSVLRSWLPEAK

SEQ ID NO: 73270 - protein, 42 aa, Homo sapiens
LTRRKVPSPLATSLPALTAHAVILVTEKLFAWKVPACLPAGP

SEQ ID NO: 73271 - protein, 52 aa, Homo sapiens
ILRWIPASSTTMCSEHVEEKKQLYLLVSFCLSSWTLTFSETQQSLQWSVGPP

SEQ ID NO: 73272 - protein, 29 aa, Homo sapiens
MKCSALFSFPCCPWGWRSTGLPGSGLQPP

SEQ ID NO: 73273 - protein, 74 aa, Homo sapiens
MRRSQAPREAGPDRSPTKPRPGLLGAGWQVPWRLLALVLLVLGPRSGATETQLWKHLDPLPRSPSFPEPEAAGH

SEQ ID NO: 73274 - protein, 62 aa, Homo sapiens
MSSCAVATLSGSASCPGLPVWRVTPPSPRDTSESRASASCWRVTTSMRCACLRTCWATARRT

SEQ ID NO: 73275 - protein, 97 aa, Homo sapiens
MLCKSSMSSWWKRGLRPSACSCCTAAWPRATSRAVSTTSPENCRHSSRAMAKPMPLLAPVTSATRLQDDMAERGARGTCVEGGPGFGPPGARPEEPS

SEQ ID NO: 73276 - protein, 29 aa, Homo sapiens
MRTSNNGLPWLPLLPHFSTLGILASPPQL

SEQ ID NO: 73277 - protein, 27 aa, Homo sapiens
MGAALAAAGAAPRAAESWARRGPEAAP

SEQ ID NO: 73278 - protein, 93 aa, Homo sapiens
MSFRNKIFLSVSSTCLPLNLWMSPPSSPVQKPQRAGSLQWRITTRKVASGKLSAQPSPWILTFRFIRWQCRECPRVGSPRNCWICMELVPDIS

SEQ ID NO: 73279 - protein, 138 aa, Homo sapiens
LGFLHARVASCSTSLSLILVSTSSPGKFPFSRLALPTRASDFHPSFSLLASDYPPPIPPRPAAQLPPPFTRTGTIIPTPLRPVWDSTCLLPNPTLISAWSLPLWPNLSSRLIGDGHSHSLVPNTSSWMDSRHPCPLFN

SEQ ID NO: 73280 - protein, 48 aa, Homo sapiens
METANPTQETVFENRASATCMMWIGEMVCPPSHGMSLLCSGIFPSLGF

SEQ ID NO: 73281 - protein, 77 aa, Homo sapiens
IFRRSPEFVVIVAAAATAPAAISSSWAAASSSSSSSWAGLIPSPLPPPPGLGPRCLVPSRSRSCRRRRRLLIHPRAP

SEQ ID NO: 73282 - protein, 34 aa, Homo sapiens
MREKNKAAAWSLFTMFIAKSFRNKQFPCTVSCSL

SEQ ID NO: 73283 - protein, 52 aa, Homo sapiens
LPLKRRQQTKSSSFFPMTSTVCAMVPVARARAVPVRTLKTSSPLPLTFSAVI

SEQ ID NO: 73284 - protein, 56 aa, Homo sapiens
ISRLIAALGTSCLLAGAAVTRWTVLALLSCRLGTSDSGRMGRNECNFTSKKNCIEM

SEQ ID NO: 73285 - protein, 71 aa, Homo sapiens
LFRPGSGRPRHAAARRGARVAAAAAAATPAARGRPPGRSHGPEWRRPPGPRRPLCLRAAPALLPECCTIFG

SEQ ID NO: 73286 - protein, 26 aa, Homo sapiens
MPLPVLLCLTLPMPLPSATARGGNRT

SEQ ID NO: 73287 - protein, 30 aa, Homo sapiens
TNPSIKKRPLIRRRLLVSFLGTHSGFLQSR

SEQ ID NO: 73288 - protein, 36 aa, Homo sapiens
VRNSLKFASCLGSCLSLFQLSRMPTRIQLDLEEERN

SEQ ID NO: 73289 - protein, 51 aa, Homo sapiens
IKPFGSCLKTFKHLMALQGLNIKAFVLKGLVYSLRNIVMSFNVLRVDQGLL

SEQ ID NO: 73290 - protein, 50 aa, Homo sapiens
LICSMNENGKFPGLPSAQLSCLPPFASAAHASLSSVFCAWTLWAHPGHGG

SEQ ID NO: 73291 - protein, 42 aa, Homo sapiens
LKLLFKTRKRRRKRKKRKMLGNIYLTCSTARTLASCCYSCKY

SEQ ID NO: 73292 - protein, 62 aa, Homo sapiens
LKCLTTLMVCISSEALKKYQVGFDIAVVRATPPHLENWEMWILRDRAVHELQAVLLALVLGR

SEQ ID NO: 73293 - protein, 56 aa, Homo sapiens
MSKSVWTKMPKVLRLIFNTIKKKNLKKMELFLPTTMTVTGSSSRDWLASTIMHVLL

SEQ ID NO: 73294 - protein, 48 aa, Homo sapiens
KKSYLFLKKKKKVFASSVLVFCTSVNLLALPSKSTAFFTFFYDQGKDH

SEQ ID NO: 73295 - protein, 29 aa, Homo sapiens
LLPSRRRSRSFSRIIPSFAGPLVSMALAH

SEQ ID NO: 73296 - protein, 49 aa, Homo sapiens
ITAGGKSMMGSRVLRTGKLLEAAGAGPGSPALAVFAFGRGQSLLFQVPA

SEQ ID NO: 73297 - protein, 44 aa, Homo sapiens
IAPTLRSQRCWMGGCRWWTSPCPSVAATWASTPLASGAPTCTSS

SEQ ID NO: 73298 - protein, 46 aa, Homo sapiens
MRWHRCSSWGRCSCAHAHAAAPPKMAKSTSTCQAGADPPAAWTFDF

SEQ ID NO: 73299 - protein, 35 aa, Homo sapiens
KPEMPRAGLIGPSGGFSVPQAAVAISGADWLVPWP

SEQ ID NO: 73300 - protein, 109 aa, Homo sapiens
MTQAGQSSGCTALWFPSMLFSLSLLSNLNQIGSSHLDRPHIPGQSAQLFIYQMSSQQLQQQPSANKKAGKIHNTPFANQLNPTQHLAKPFQQILPGRQSGSLTSPFLAC

SEQ ID NO: 73301 - protein, 109 aa, Homo sapiens
MLAVPVTCGDTARSALQPDLLARRRLKRCPSRWLCLSAAWSFVQVFSEPDGFTVIFSGLGNNAGGTMHWNDTRPAHFRILKVVLREAVAECLMDSYSLDVHGGRRTAAG

SEQ ID NO: 73302 - protein, 43 aa, Homo sapiens
LRGSLSGPVEDAALRQVLALLPGAAPGPAAGAGAQLLGVPAHA

SEQ ID NO: 73303 - protein, 97 aa, Homo sapiens
LFFLLQHSPSSAYPHPQRLPSPAVLPLVAASPSPGPLHFQLLPPKFVLVSPFPALPIRSLFHLQLFFPASLFPPPMVSPWLLSTPLASSLVFPWPWH

SEQ ID NO: 73304 - protein, 122 aa, Homo sapiens
LPPATSTPPCSCPFLLLPFLLLSSLSSPPSSSLLLFPLLLSSPPLSSPPLLSASPCFSNTSLLSMFSLHVVPTLRTGGRRGWLSAWHLVSTQHMPAAAGTALISKSLLRVRCVPGALARGAW

SEQ ID NO: 73305 - protein, 50 aa, Homo sapiens
LTALGELKRMRVGSVRGAFGAAFLAWEQNWPGGSDVWVLPAHIPRHLLGV

SEQ ID NO: 73306 - protein, 43 aa, Homo sapiens
VARLLTAVAAEAAARSSARAVLSRRILAGAGLRPRGIRWRWLR

SEQ ID NO: 73307 - protein, 37 aa, Homo sapiens
MPGTAAAVAAAAAAATATAATAAGPGPGWGLESLQWG

SEQ ID NO: 73308 - protein, 124 aa, Homo sapiens
LSLMKRSNILAVMLFLISWMSTSISPLYPSLLVWISRYTTASSCSPSLGAGPAGTPRRSPSTVAAAPQRWPPPLTLRWHTSPYPPESPSTCCLYRQALGSWPLALCLQHCHLHVDWEPHSPRTC

SEQ ID NO: 73309 - protein, 60 aa, Homo sapiens
LPLRPAAAIQACLSLSLSFMPLSPPHLGTASSKNSCYDTEFNQEVMPHSIRNYATAEEVY

SEQ ID NO: 73310 - protein, 42 aa, Homo sapiens
MLLIIFPLLLVLVLRVRTRVVGRGCFLTGLFIGTMYYLSNTM

SEQ ID NO: 73311 - protein, 109 aa, Homo sapiens
LAPPPPAPLLGPPPAGRLPRSTYLWCPALWPLSSRPRAPSARPVQPGLPGSRRPPRADRVPMDRRTDTCRSDTADPVTWRIVFIPHLRICPNWSAGPIAMGLFAASFQT

SEQ ID NO: 73312 - protein, 66 aa, Homo sapiens
LGTRRDLDWGRTLSYLWEVVQPGHRFHLPLAEEDHGQDDSEHAGAGRGRYRGGDQHDQHSLAERCL

SEQ ID NO: 73313 - protein, 62 aa, Homo sapiens [sequence omitted]

SEQ ID NO: 73314 - protein, 57 aa, Homo sapiens
MAQFPSSLPALTWSLGRLAQQPGGCRRHGVSSWVQGRHQAFFWLQERTRGWERGGKN

SEQ ID NO: 73315 - protein, 106 aa, Homo sapiens [sequence omitted]

SEQ ID NO: 73316 - protein, 73 aa, Homo sapiens
LTSCRPCVYYLSSDVLSKCCTRARRHLRLPFRACSPPSLLAALWCSLLKALKSPLALRLVVRSLPVSLPTYTT

SEQ ID NO: 73317 - protein, 83 aa, Homo sapiens
LPPWARLWPGHSPPGLDTFSRAGLQGPLVGLPAWATLPAWASPWPTWASPHHLACPPGAKSGPATHPLACPPNSWALPTLPRP

SEQ ID NO: 73318 - protein, 101 aa, Homo sapiens
LIDGVRGRRQMTAFGLGIPTFLVMQPSGSQPRFPALTQNGVALVRTPLTSVYLRVRPILPAGLCLGVTLPELAPTTVATVMLMCDCCQEPAHMTVWRKFFP

SEQ ID NO: 73319 - protein, 87 aa, Homo sapiens
LATRPWAKSRRGYTWGLDVPSRLWWALSPGFLAACCACGSLGTVGLCVCPCVCMCVCMFLSPLDSCTKWLMGTISRQIVKIDRKSFS

SEQ ID NO: 73320 - protein, 305 aa, Homo sapiens
MRHLPPRLQLAQQPALAHAHPHAGQALRVPLLQPPLQPVVHAAQPRAPAHGRAPLQVPGVPERLLAAGRPARPPEERAAPAAQHRAAGTLARAARPARARARARRRRRRRRRRRRAPPAGHGAVSAPAPPPGPARSWVPGTPAPQRDSPSSPNPRPGAAAEPRALGLRPGGGSQAPPPWPVSQMRTLRAASLTQATQLVRLFGRLLWEGVPLPGLAPESPCCCRAGRPGRHPPRGWQESGLRAPEGPSAEEGESPPPPPRVLCFGMKGGRPPCPGVVGRGGCGGAISSSGPWDWCPEVSGVLTQP

SEQ ID NO: 73321 - protein, 22 aa, Homo sapiens
LRPGLLTFCPPLSAGSAWSKRC

SEQ ID NO: 73322 - protein, 71 aa, Homo sapiens
LCQEAGWNKGMGRLAWGQPLPLPGCCCVFLPARGHCQDHASLFISRFLSSAIVVFWWRKKNRVAVFELPGT

SEQ ID NO: 73323 - protein, 28 aa, Homo sapiens
MGGLLTALRWLPARAGEAELSVPLSRTS

SEQ ID NO: 73324 - protein, 81 aa, Homo sapiens
LLRFPLWVPVLAAPVAAEAAVPGGREDPALWPVDAQRPGTDLPCLAWRLSCGHPSMGFIEISAISTPPKQFKGKQHFLLTS

SEQ ID NO: 73325 - protein, 80 aa, Homo sapiens
LHHGVALFSCPAQTLLCGAAEATVSASCSVRPAHGLRGWGRVPGAARRAQSPVRLGEVRRPTPPLTLEKMWVCFLKESYI

SEQ ID NO: 73326 - protein, 36 aa, Homo sapiens
MPSRKLMLLGPSQADLGTSHALLSSTRPLHSILEED

SEQ ID NO: 73327 - protein, 24 aa, Homo sapiens
MWNCTQTVAQVLVALASTGSLLEM

SEQ ID NO: 73328 - protein, 26 aa, Homo sapiens
MTSGVLTVASLKASFCYVEHAALIQI

SEQ ID NO: 73329 - protein, 61 aa, Homo sapiens
IVFPNSTKRSHQRSMKRGSAAVAAAAAARLVGCGERLLQDLCLEGAGPEKLQEPSPEPKRL

SEQ ID NO: 73330 - protein, 29 aa, Homo sapiens
LHMLLMVSSAPSCGLIQTVSSFTVYIFTL

SEQ ID NO: 73331 - protein, 53 aa, Homo sapiens
VTSASSPIVGKRETEILPVTEHMRMQQLLGVTGFLWVLCEEYAFIPVSGRGEE

SEQ ID NO: 73332 - protein, 40 aa, Homo sapiens
LYAKELVLGAPWFRRQPPASSSFCCCSWGLCLLPTPALCP

SEQ ID NO: 73333 - protein, 46 aa, Homo sapiens
RMYVALRITCTGLPSASLERMNLHHLTSLFSSYLLFVCLFLFLQLK

SEQ ID NO: 73334 - protein, 57 aa, Homo sapiens
LRPCWKLPIKKKRMSNKGKKLKRIILAIPPAAPATVAMRPVEAAPSGRQATITKPSL

SEQ ID NO: 73335 - protein, 26 aa, Homo sapiens
LPRLRKSLVLGGGGAAVAVMATGLGG

SEQ ID NO: 73336 - protein, 32 aa, Homo sapiens
LPRLPCPLLASVAAALAASGGAAAYCLSPRRR

SEQ ID NO: 73337 - protein, 92 aa, Homo sapiens
VCVLGVCVLGVCRGAERRAGPRGRKEAVELPGLGLRLPSSALLPVRSDAAAAVALSAPRWGRGAQAGSSENPLRRLPVPAGLRMPGRLICTY

SEQ ID NO: 73338 - protein, 62 aa, Homo sapiens
LTMCYRPFFNVRVAILFVATVAQSSHVVQLAGALWDPFATWLWRKWLIQYFSPVNMRLLDVK

SEQ ID NO: 73339 - protein, 56 aa, Homo sapiens
LVVTAGGAGPGAQRGGLWRSEGRRCFVAWTLVSALEQAGAWSAAGPPWSPRWARAS

SEQ ID NO: 73340 - protein, 38 aa, Homo sapiens
LLMLPCGTCHGAGTAALSRPAVVAAAAAAAGPERRSCH

SEQ ID NO: 73341 - protein, 56 aa, Homo sapiens
LWPLQVWQRWGMGIGVSISLCGVSQGGQWGWGWDAVCAQRGQPGLIWPRGFWMFLG

SEQ ID NO: 73342 - protein, 44 aa, Homo sapiens
KPRDTCWRADGICLAWAGVLALLLLSCRATSDDRLFPLSLSFSS

SEQ ID NO: 73343 - protein, 58 aa, Homo sapiens
VGAAEEMDINPGVKSQGMKPAGAGNLGFRTLRRLLGCLTLTLSGRILNPSWVSSTGMP

SEQ ID NO: 73344 - protein, 81 aa, Homo sapiens
IQHPSRHSAVSCLGVAAAMARKALPPTHLGQSWFCSCCRDTELAISALRARTATGSPGSCRCTAGPLPCASALESCCCRVT

SEQ ID NO: 73345 - protein, 66 aa, Homo sapiens
MPPTVRRGCWARPGWSLGLAGAAQNCLLRKRCSPGPPLSPGLRRTRRLPDQRVPEEDSVATGFSRV

SEQ ID NO: 73346 - protein, 66 aa, Homo sapiens
RKCWLAWCHAEGLRGQSPVGPRTLLLVGCFSPLLRLGNPFPHLHGAGVSGPGLSWLTAALGARLAG

SEQ ID NO: 73347 - protein, 90 aa, Homo sapiens
RRVRRNTRMVIAGLFAPILKKAERSSAGASQSAGLLPSFGARSQHLPRKSRNHGASFCWLSREAQSVLQRLRIEGCSLKLPAPGHAAGSR

SEQ ID NO: 73348 - protein, 50 aa, Homo sapiens; identical to SEQ ID NO: 73305

SEQ ID NO: 73349 - protein, 84 aa, Homo sapiens
MQLLFLVFVLFLFLFLIFIFLETGPCSVAWAGEQWHHHSSLQPQTPGLKRSSPLSLLSSWDYRCAPPHPAKTAILPLRVIRKIH

SEQ ID NO: 73350 - protein, 65 aa, Homo sapiens
MRHGRHDLAVAPAAAAGKVARCIRFGCSYLLRTHWMSSIVHSFLRLLQHPLREFHSCCPGWSAMA

SEQ ID NO: 73351 - protein, 26 aa, Homo sapiens
RTRAGVFALSTTALLQQCTRTRPGAG

SEQ ID NO: 73352 - protein, 69 aa, Homo sapiens [sequence omitted]

SEQ ID NO: 73353 - protein, 25 aa, Homo sapiens
MLKRKHVFSSSCIFMWSCSLPNVED

SEQ ID NO: 73354 - protein, 47 aa, Homo sapiens
MKVPVGSSVLSSLGSSVRALLSVSFSLSSSLGDRLCRHVGSAFSLLP

SEQ ID NO: 73355 - protein, 88 aa, Homo sapiens [sequence omitted]

SEQ ID NO: 73356 - protein, 37 aa, Homo sapiens
MQTTMKDWVLALPGSAAAAAAAAAAAPPPAAAARAPL

SEQ ID NO: 73357 - protein, 78 aa, Homo sapiens
MGFLKTVLLGTSACVSPPTMPAFFSLPAERRLQAWPQSEAPLSVSSCFQNRPPEPASFQNLRPEPASLQNLRTEPTSF

SEQ ID NO: 73358 - protein, 151 aa, Homo sapiens
MERVLFFLLPSHLLNQGAAAAAARCTHTERSPQVPGAREARCTGTEWSSGLPRSTRKQSPGPSSHREPSSQSPSSPSSSSWSRHRQQQPPREQRQLRLPGPGSAETRRAPSDPAAAAALRLPSAAARATREAPREPARPAGAAGIRWLFLQ

SEQ ID NO: 73359 - protein, 28 aa, Homo sapiens
MRKRWMALSAAVIAASARELSIAAAPEA

SEQ ID NO: 73360 - protein, 18 aa, Homo sapiens
ILWTWAWLECSGVLKILL

SEQ ID NO: 73361 - protein, 44 aa, Homo sapiens
RPEAVLAVAAAAVARRPGTESESTVASAAAAAAAAVATAAGTRS

SEQ ID NO: 73362 - protein, 96 aa, Homo sapiens
LELGHLSYHWSLSLKVPAEFLPLSAFAAIFLPPVPQDPTKNSVSWDSQILLNQARKEGKRVREWYSQILLPPAPFPSSSETRCWLLYLLPEVGNVW

SEQ ID NO: 73363 - protein, 43 aa, Homo sapiens
MVFLSSLSNWLISCFLSECLILCFVSECLSSSKKGFLISSLFI

SEQ ID NO: 73364 - protein, 131 aa, Homo sapiens
LAPDVCSFTGCLICLLHPTGPPTSSDVFLIMSAMCPILLHALPPFPTTAEWPGTCLKCLFPISLRDQEGILGMPLTSLLSRQQKWRGSQESALNCPPGWQGSLNRYLELGSGLFPCVLTTRASCSRAGIRG

SEQ ID NO: 73365 - protein, 47 aa, Homo sapiens
VKPVAGGRAGPTKMAAAPAAGAIWATAAAKAAAGPTGGLHGGSRGWP

SEQ ID NO: 73366 - protein, 53 aa, Homo sapiens
LIPPAYQLLLWSLFLTGNWPLCVCVCVCVCVCSCTLGCQAFCACTKKGEIIIN

SEQ ID NO: 73367 - protein, 52 aa, Homo sapiens
MSSLFNIFFPMPSLWIPTAGFCLLHAENKITYSLLMQSEAPEEQRAQLPEPH

SEQ ID NO: 73368 - protein, 74 aa, Homo sapiens
LTTSPSAPVSCGLVSSRLSWPHRSPIRAFPVLCPGSGSAIFGLSELVCYSVVAESTEAVFASLFLAVERFPPGG

SEQ ID NO: 73369 - protein, 76 aa, Homo sapiens [sequence omitted]

SEQ ID NO: 73370 - protein, 40 aa, Homo sapiens
VLAVAAAAVARRPGTESESTVASAAAAAAAAVATAAGTRS

SEQ ID NO: 73371 - protein, 128 aa, Homo sapiens
LASYGMRGSWHRSPLPAVVLPSVLQTALSPLALCQAWRRAVPHGVPSQRLRNQEASLVPKGVPRAWYPGPLQNGLWTHLEKGELLGLKPTPGGLLLLRSFWDPHPSRPFLCTLLPPPLRIFPPLRCSA

SEQ ID NO: 73372 - protein, 67 aa, Homo sapiens
LRPRSAAFAPRYTRLVMRRSSRSFRLQCTGFPSSSAQSISAHLSNSMPSSLLTISRCPGMFAVRCPL

SEQ ID NO: 73373 - protein, 124 aa, Homo sapiens
LLVPLPSAAPSLVRDFPVALDLRIYSSTPSAPHYPESHRVSVVSPVDVAGVSWYCGGTQVVHAWDSGGRREGQLRVDVKPPFLFWTQPGLHCNLHQDQDPGPQAGMVLPRKGHFRRSPAWAIQS

SEQ ID NO: 73374 - protein, 38 aa, Homo sapiens
MLPNVLSCASVLSPCWGDRRGSGEALGLQSLALLCAVA

SEQ ID NO: 73375 - protein, 51 aa, Homo sapiens
MEVASVAAYCAGCSSLCSAARCRIRCPLWLFCWLEDRPGAATPPLGKAETL

SEQ ID NO: 73376 - protein, 102 aa, Homo sapiens
LCWGTLLLYLFSSLFSLQCSKCSPCEMSSTLILLLFTDLLLCMRQGVRHSGSCIDDCPILEMSAVRGLQAEQPVRCVAPPGYQAWGLPLTHGEPSLTRAEFV

SEQ ID NO: 73377 - protein, 39 aa, Homo sapiens
MKCGSILYVSTPTFSLPLSGTAEPGLAQQISLSTHLLQV

SEQ ID NO: 73378 - protein, 41 aa, Homo sapiens
VSPGGAWLGRRALSAAPILQILAEAFVMSAAAETGVLKAGC

SEQ ID NO: 73379 - protein, 44 aa, Homo sapiens
LRSKLSATSWTLGTLLRTMAFNSQTRTFRITKETGSFHILILVM

SEQ ID NO: 73380 - protein, 49 aa, Homo sapiens
VSLLIVLLSLPRSRFSIRLLGIRLFTRPHSRPTRALVAPWVCFILKRSG

SEQ ID NO: 73381 - protein, 37 aa, Homo sapiens
MLLSLVSNPLPLSLTPLFSTRLSLSPSPVRSGAPHRH

SEQ ID NO: 73382 - protein, 41 aa, Homo sapiens
MSPGSLSRRTKNVCVREGVCCCFTAVCMCQCWNRIWKILNN

SEQ ID NO: 73383 - protein, 40 aa, Homo sapiens
MLCSLFHQLLLSGSPDLRGESPETLDSAAPELQHRIIWLL

SEQ ID NO: 73384 - protein, 96 aa, Homo sapiens
VCVCVCVCVCVCVLTSVNQAISPAKAPILLSELTPFLRQVEKCNVAFSTSHFPVPSVSGALGESKLGHPLAQRTPVVGTVLSGSGCLGCTGLGALP

SEQ ID NO: 73385 - protein, 27 aa, Homo sapiens
KSVFHGVCLHLLTSQVLKQKTKAMILM

SEQ ID NO: 73386 - protein, 91 aa, Homo sapiens
ISTMATAMPMAMATLTRASGMDIPTITTMDIHMRIYTMAIAMATPMRASTTEDMDMTMSIAMEAMGSLGLQASSRTWMLSLSGLMHWGPQC

SEQ ID NO: 73387 - protein, 33 aa, Homo sapiens
LELMSRPAAAAAAAAAALSFVSRAVWARAGVPE

SEQ ID NO: 73388 - protein, 39 aa, Homo sapiens
LMLKMYHLSFQHLTTTSSVSTGISSSLYLSYRPKCHLSL

SEQ ID NO: 73389 - protein, 59 aa, Homo sapiens
RSLTILILSSCWMSFTQKINSTWFLNFCTKISRNSWMPLLSLAFLFPSSRAICSSCSRA

SEQ ID NO: 73390 - protein, 40 aa, Homo sapiens
IPPIPANMTAAVSLTRSPAISASCAASRSASPWAWPWTWF

SEQ ID NO: 73391 - protein, 65 aa, Homo sapiens
LEEAPQAGDLGRASPKPPASGRHPLKYFLQGFPFVRVSSSLTGLSGGAAGSALRNSGKWTPFSCP

SEQ ID NO: 73392 - protein, 90 aa, Homo sapiens
ILLPGDPLSSHLLLLPLLLHRARARTPPGCRSRTAPARTTRRCRCCGTRRSRWPCPWCTRWWRRSASRATSSLCGCCAGAWGPDPRRSSS

SEQ ID NO: 73393 - protein, 73 aa, Homo sapiens
VASVSVVSFLCLAPHGFKSTRAGVETAHLALILSDWWFWPVSRYLSIGKAALRCGGHPDSHRLHSRNGSMRLY

SEQ ID NO: 73394 - protein, 32 aa, Homo sapiens
MSLPLCSLLWESSALLDMRLEGCLGLPTHKLC

SEQ ID NO: 73395 - protein, 83 aa, Homo sapiens [sequence omitted]

SEQ ID NO: 73396 - protein, 34 aa, Homo sapiens
RSGPTAPSLLKVMQMKSFCLIFHLRAMSSSKASL

SEQ ID NO: 73397 - protein, 31 aa, Homo sapiens
RLPSFVVSQRCAGLLLAALRIQGVGCQVQVS

SEQ ID NO: 73398 - protein, 28 aa, Homo sapiens
LGFRGLLFLVLLLSSLFPVWPWLTLKTL

SEQ ID NO: 73399 - protein, 37 aa, Homo sapiens
VAAAAVARRPGTESESTVASAAAAAAAAVATAAGTRS

SEQ ID NO: 73400 - protein, 87 aa, Homo sapiens
MVSHRKDWRRVNLRFSSCLLLSICLDDKPSADELCFWTDHGRSQLTCPSLGVSQGQGLIMLPRLVSNSWPQVISLSQPPKVLGLKLH

SEQ ID NO: 73401 - protein, 14 aa, Homo sapiens
IRPPDSWALALALM

SEQ ID NO: 73402 - protein, 45 aa, Homo sapiens
MMTFMMGLKRKMLMMVSLLLLNNWTWEMKFTMMWIPLISLFHQQR

SEQ ID NO: 73403 - protein, 31 aa, Homo sapiens
MRRCCPWRCAPLSAPAWLPTPCPASRGSPIF

SEQ ID NO: 73404 - protein, 33 aa, Homo sapiens
LHRRHRRSATTTAASCPAATATACVAAASGPAV

SEQ ID NO: 73405 - protein, 35 aa, Homo sapiens
VESPAPAAAAAAVAVVVAAAAAGERARAGKPQSEI

SEQ ID NO: 73406 - protein, 35 aa, Homo sapiens
LCFLIFPSALFWGGGYSSFGITFPPPMCFPSFEIF

SEQ ID NO: 73407 - protein, 35 aa, Homo sapiens
LSLMSLPLCSLLWESSALLDMRLEGCLGLPTHKLC

SEQ ID NO: 73408 - protein, 86 aa, Homo sapiens
LREPNISTAPRTFLSPSTATLMNGRYGRAALTQFCTLTCGGGQTSCWWLLLMPTLWGRWPVASVTTCLPASCGPGTAASPCSSARP

SEQ ID NO: 73409 - protein, 40 aa, Homo sapiens
RSSVSQEMIAPPALGFWPRRWRLWLAVTLAFQARPGEATR

SEQ ID NO: 73410 - protein, 63 aa, Homo sapiens
RRPLLCPVTFPSPGTAPRPSPASPCPSCHGSRKLWGPLGWTPWKSARSTLGPAGPPLYPSKTA

SEQ ID NO: 73411 - protein, 35 aa, Homo sapiens
LWSWRRTPRAWASASSAWAPGQTWAWRSWVSSSRP

SEQ ID NO: 73412 - protein, 33 aa, Homo sapiens
RKLAHLGRSVLLGFSLEHSLDLISSERVMGQHG

SEQ ID NO: 73413 - protein, 64 aa, Homo sapiens
RKPRCFPQPWTILQDSFFTLSTCLVRLHRTVVYCPPLLTSSFSLALSVFLFSPSSLPLAITSGK

SEQ ID NO: 73414 - protein, 46 aa, Homo sapiens
LCPKLIYTSGSSSLLKTNAQMLFTDIYILVSLSCPTLLLFPIPNSS

SEQ ID NO: 73415 - protein, 23 aa, Homo sapiens
VGMRFAGLVAAAAAGGPAHVKPA

SEQ ID NO: 73416 - protein, 26 aa, Homo sapiens
MAHLSGQPCASCCWLWQCLSSAQLYP

SEQ ID NO: 73417 - protein, 74 aa, Homo sapiens
MLASLSGFLMTTTSKHAAYCLKGSCLTQARVQWPLKLTTASNFWAQVILSLPVVFVDCLMESHGTRRLKQCLQF

SEQ ID NO: 73418 - protein, 78 aa, Homo sapiens
MPGLANMKMILCFLLPHHRLQEARQIQVLKMLPREKLRRREERKQINGKKERTKYETPRKREGKKGGNNHICHLSKRD

SEQ ID NO: 73419 - protein, 62 aa, Homo sapiens
MWLRGCVCVWMCVGCGCPLRPSSSPSSSCSPLLSFSSSPLSSPSSWSSSPLSSSSSPLSSSP

SEQ ID NO: 73420 - protein, 92 aa, Homo sapiens
MSGGWTSRKGSAGAGAGVRGLGPPTQAISPMLSSQQAERSEAPAPSSWEPAVHTPLTLPTSSFQVDRFFVLGFSTSPTPPSPVWHKVAPWWG

SEQ ID NO: 73421 - protein, 40 aa, Homo sapiens
ILRVYAPMIGLVSKTNAIISLKKKEIGIQVNTTVPLNMPT

SEQ ID NO: 73422 - protein, 28 aa, Homo sapiens
LRRLLGCLTLTLSGRILNPSWVSSTGMP

SEQ ID NO: 73423 - protein, 66 aa, Homo sapiens
LGLAAGSSCLFLHCFAPFVLRSNSAVRAGPPARPQPPRSHQLQLQLRSLRLPQSPAALSEAWSYFL

SEQ ID NO: 73424 - protein, 28 aa, Homo sapiens
LRLKCHVYLISLIFLFLQAYQSHCWLSL

SEQ ID NO: 73425 - protein, 82 aa, Homo sapiens
VPPHPRRRVHSLLAAGPAAAAAAAAEGMSPGRARRLPQATARRGTPSRAHRSTARTPAPCGTRLRSLEAVSVIRMHWAPRSW

SEQ ID NO: 73426 - protein, 24 aa, Homo sapiens
MAAAASATASAAKVSADGSRHLTA

SEQ ID NO: 73427 - protein, 25 aa, Homo sapiens
LFRTMSALWLRRSATALAWPSLAAK

SEQ ID NO: 73428 - protein, 43 aa, Homo sapiens
MNSKAFVLCCFCNGMIPQGQRTSFQGKDVGLNTEENPPEIDHL

SEQ ID NO: 73429 - protein, 49 aa, Homo sapiens
VAATSALLAPPFAAHAPSRGVSWPPPAELGSQQSPGHPPPAVRSPLVPG

SEQ ID NO: 73430 - protein, 46 aa, Homo sapiens
LKSKGVMQEYARPQGLETQRASEESLNDSQQFQSQSYHVQHSQGSM

SEQ ID NO: 73431 - protein, 60 aa, Homo sapiens
MHVGIGISQFSRARACTMFHLLGFVTYLLVCLGDSGVGRGESSSPINKLILYLPDSQLPC

SEQ ID NO: 73432 - protein, 105 aa, Homo sapiens
LPLPLLPPLVLPLSGARLPVAAAAASPARVGLRGLPPSQPRSFPAACKSAWLRVTCQCLRQRLREKNALHSFFHRHTVFYTKSHFYSNILLPLDIALGEVPGSID

SEQ ID NO: 73433 - protein, 95 aa, Homo sapiens
LIAAAVFPFFFCRRLLCLFSSFLALLLCSVTSPNPLPTQPAPFFFCLRCSISPSAAAATAAHSWCRCRAFTPKSFPQPMAQAALGISAQGNHIPL

SEQ ID NO: 73434 - protein, 28 aa, Homo sapiens
LELFRRSSLQSLLLLYSVGPGGAELSGA

SEQ ID NO: 73435 - protein, 29 aa, Homo sapiens
LTFLGGQCGCQVPVLLPCTFHFGSPWIFS

SEQ ID NO: 73436 - protein, 69 aa, Homo sapiens
LRPSCVSPLRKAAEDLGGRQYPEDCGTLSAVPCSRLRRTRVGVNTLKIAALLPQSLALGCGGPGWASIP

SEQ ID NO: 73437 - protein, 57 aa, Homo sapiens
LKLAHTAEARVGVGASLPSFSWSPSQAELGLPCIFQLQIQCLLQFPQSSSRITEGRI

SEQ ID NO: 73438 - protein, 78 aa, Homo sapiens
VRGAGRGARVGGWAGSFCAAVVGWAAALRAEGQSGAAQPVPGRMRRRPAPPAPPARVLGGGEAGGREEVGGPRGGREA

SEQ ID NO: 73439 - protein, 26 aa, Homo sapiens
MVALGLLVQSISPTLGVWRGAWEASH

SEQ ID NO: 73440 - protein, 131 aa, Homo sapiens
LLICLSSGCQATAAWGLAECARPRLHWRLTWQLPSLPPGLPNAGAAPLATSAFLPSAPSSLHRQPCVAQRLAPPSLCASVPPAPFIFLRPRAGVQLSGLGSLQPLPPGFQRFSCLSLLSSWDYRCMLPRPV

SEQ ID NO: 73441 - protein, 28 aa, Homo sapiens
MAAAMLGPGAVCAQRAAARPGRLARRRR

SEQ ID NO: 73442 - protein, 149 aa, Homo sapiens
LEAVAAVAGPGDGCDLVLRMLQAAAGLAPCVTGTMLGLPTTCVWLGSGLGSLLPAEVPLLQVAVCPAQHHAHACVLEHTAGAAVPASCLPGPALAATRTLPPAVQGGLHGQEDSGTARVGTHVALPAAQFPAAATGVCPLQPCPPAGAA

SEQ ID NO: 73443 - protein, 95 aa, Homo sapiens
MDGLFLNFFQACFSLPSAMSGSGLRPSPEAKQMTAPGFLYSLQNRLQMKFKKSAVTLLGPGGEQEEGRQQVWLGQIGEAQWGTFARQIERQAQRA

SEQ ID NO: 73444 - protein, 40 aa, Homo sapiens
MLKLFLSHFCLNLIQTSNVLLWNGVGKMQAISNNKSVLKF

SEQ ID NO: 73445 - protein, 38 aa, Homo sapiens
VRNKSPKFPKSPWAGGHCLLFLLHRVVLSPQPARQTLP

SEQ ID NO: 73446 - protein, 59 aa, Homo sapiens
MLRNHLLYPGAAAAAAAFAFGAEFNKRASEQASAGGKRQRMSAIYPPLLGALSFIAASS

SEQ ID NO: 73447 - protein, 30 aa, Homo sapiens
LGAGVLLSSGAARNGGSHLASAAGMDQTAS

SEQ ID NO: 73448 - protein, 37 aa, Homo sapiens
MGVPGAIISLPGALIPCIVSLVKSEQPGRALVQTWAE

SEQ ID NO: 73449 - protein, 32 aa, Homo sapiens
MCGGRLLWVAPGASTAAKAGGRQALLAPTPSR

SEQ ID NO: 73450 - protein, 32 aa, Homo sapiens
MSWGFGSTARRPRACTSLAVSSPSASGAFSVE

SEQ ID NO: 73451 - protein, 23 aa, Homo sapiens
MPSKGVCLFFFHPLSSNLFVTGK

SEQ ID NO: 73452 - protein, 106 aa, Homo sapiens
LREIFLYLLKLLRSSEALGLPWEAAPLQSPKPKSNLKRARLRSQSPRKTSGPPSDSHAVRKPMLTMCRGYMEKERDAWPAPCCFSHVSEEGTRLVSGDTNLDVQPS

SEQ ID NO: 73453 - protein, 56 aa, Homo sapiens
MGHFFLVTEAVVLIFRRRCISSRFCYIFGIKYGLRCLRFSGINFLLLNAFFLLLEM

SEQ ID NO: 73454 - protein, 90 aa, Homo sapiens
MLDHLTRSCEVTSLLPFLLLPSWHQSLKSQKTLPVNWRRSRSSIRLGNKSLPPLLQLLASHSQQTQAARKEKNFNFNTRSKFLQTHASDS

SEQ ID NO: 73455 - protein, 34 aa, Homo sapiens
MWSEFQKLASFSLPLILTIPQEFCIQGPKVCYPR

SEQ ID NO: 73456 - protein, 58 aa, Homo sapiens
MLRCPPKWIASYLVPACCRLLHLVPLGTHCAANSSRQIHWEAVAHEGISETFFCDLAV

SEQ ID NO: 73457 - protein, 81 aa, Homo sapiens
MRAAPLGKISRCPSRALSSVIGSGSLCQAAGRIKETTRRRSALSRLAPCGLLFPSLRPGETELIIVTGFIFREKTWSLNKN

SEQ ID NO: 73458 - protein, 74 aa, Homo sapiens
MSQDYCNWKSVLLCCCIPCLILKPETRKAVACLFTSCVLFKKYLLSQDNTNKVDLRIGVPGLEPCWYHLLTACF

SEQ ID NO: 73459 - protein, 68 aa, Homo sapiens
MSQDYCNWKSVLLCCCIPCLILKPETRKAVACLFTSCVLFKKYLLSQASGIFLDICSSCFLTACFFSE

SEQ ID NO: 73460 - protein, 35 aa, Homo sapiens
MGCGPAGVCWGPLVWLWFCSIPPSLSAWPSSGLSS

SEQ ID NO: 73461 - protein, 53 aa, Homo sapiens
LASLVGSSSWPRQTGGGSGPDCGAMAVVSSFAAAASLAESPASALGAPTASAG

SEQ ID NO: 73462 - protein, 24 aa, Homo sapiens
RHSLARTCLLFFLCPEILEHASSK

SEQ ID NO: 73463 - protein, 48 aa, Homo sapiens
VHSLGPVAVLATQAPAAGTPTASARPPPRCPRPRRPRSWRAARLWRTT

SEQ ID NO: 73464 - protein, 59 aa, Homo sapiens
KSPLTLDELFGSLRPSLKRMTETLWATRCVSALGELSSLTISATSSSRNWGRVGSAMWT

SEQ ID NO: 73465 - protein, 116 aa, Homo sapiens
LEAPRLAHSARPSAGAGALAATLLIWGQSRNPVTRLRPNPRPRPPAAAKASSPAPGARATPVARAFQSRLQQKLSITSNWVVERIHLRRLLLLQGLSSLHSMANSSAAAEALLEAS

SEQ ID NO: 73466 - protein, 91 aa, Homo sapiens
RSSQKKMLSLFPQLSLCAVAPFSSSNSRTLMISQNRSTSFFASGKNRFQLSPTNFASWLDISARLAGVILQKSSNSSGKIKCSLNHSSVLM

SEQ ID NO: 73467 - protein, 139 aa, Homo sapiens
LTAAAGLRLSALGSAASAPLHSTSAPSDSLPSASTPPAPVRIVSQLLATRPVPGCFSISRPPLLEYFTPCIWGQGLEKGRVERPVEKKEARPAGGGGSADCGEETPRHPFWSSPLPPRPCAHSLAGELLSDQESKSGPG

SEQ ID NO: 73468 - protein, 53 aa, Homo sapiens
LGHTGARCRSPVLRHLVWNFRLAVSSRSGALCGVVWWKNGPCVGLTPSVCVSE

SEQ ID NO: 73469 - protein, 51 aa, Homo sapiens
KTPAGCRSMKTSSRRKSKSFMTSTLLAPKSGSMHTHKCIFLFFLPFECIGV

SEQ ID NO: 73470 - protein, 75 aa, Homo sapiens
RGPNKKREEMEITSPDLAFLSLFLFSPLPSDDWRVKGNPERGGEQRFEKMQECVWRRVKLPFKLWPPGTRCSAAG

SEQ ID NO: 73471 - protein, 46 aa, Homo sapiens
LAARVGAIAASASAASAVASSARAVRCCAGRARRGRRGRHGARLGD

SEQ ID NO: 73472 - protein, 31 aa, Homo sapiens
KAAAGEVVVLVSLSHPVPSSSLQRHTLSPPP

SEQ ID NO: 73473 - protein, 80 aa, Homo sapiens
LLQTSTPRPQEGEVARQVADRVRLPPCRGSRRNETLLPLALCPSLSSCLASYSLPCVPRLPHILARPSTSGQGRRWPSRS

SEQ ID NO: 73474 - protein, 29 aa, Homo sapiens
VVAAAAVGTAGAVVLSARPSETWETRGRK

SEQ ID NO: 73475 - protein, 44 aa, Homo sapiens
LSEGAFFLASMALRGAPAGGGAVRWSPAFPGDTGPSFEVESFWF

SEQ ID NO: 73476 - protein, 82 aa, Homo sapiens
LENLCPCIVSPWAPTAASSAPVPPGSPCWCLVFFSLSCPCVEGSKLRVSSPIPSLLLTAGLDVVYCGLFYFLHFVLKLKYAK

SEQ ID NO: 73477 - protein, 26 aa, Homo sapiens
RALTEDCLAGGTVLVLSSQAQQALPS

SEQ ID NO: 73478 - protein, 42 aa, Homo sapiens
TLLPLPPLPSPLLFRLRLFLSPAAPAPSLGPGGGLGSLQSSP

SEQ ID NO: 73479 - protein, 106 aa, Homo sapiens
LGALSGLSLICRRSPGGLLGCLLLPAGAGPPPSLVIRGWTSWEKELSVVFGGRDSPLLLGKKPDLPASWHLSLLLAPLCLASACILSVLRPLGVPCWPGSCVLRTR

SEQ ID NO: 73480 - protein, 80 aa, Homo sapiens
LAAGLGPLRKSIRAAAAAAAAAAAASAAEEDSAARAPPATSAAESHRHRPRASGQELPPPAPVPRPPAAPNPAPRARRHE

SEQ ID NO: 73481 - protein, 51 aa, Homo sapiens
VPAAWTACLSAGGLAVGGQEGSPLRTNLCAGPWPEWGGWPATLRDRTSSCV

SEQ ID NO: 73482 - protein, 70 aa, Homo sapiens
LAAGPAAAAAAAAEGMSPGRARRLPQATARRGTPSRAHRSTARTPAPCGTRLRSLEAVSVIRMHWAPRSW

SEQ ID NO: 73483 - protein, 56 aa, Homo sapiens
VRGNRKWAAAAAGPLAETAAGAGPRDAGTGRGPPERGKDAGRRSGFKDATSCSAVS

SEQ ID NO: 73484 - protein, 39 aa, Homo sapiens
RIRVSSGKTLAGLVGCAAPRTASHQPAPSLSCSTLICTP

SEQ ID NO: 73485 - protein, 12 aa, Homo sapiens
LSPSVFLAMTLL

SEQ ID NO: 73486 - protein, 13 aa, Homo sapiens
LRRGALFCSVLFF

SEQ ID NO: 73487 - protein, 14 aa, Homo sapiens
LLVNVILMFFLGTR

SEQ ID NO: 73488 - protein, 67 aa, Homo sapiens
MQSQAAREHKPGASRLLLLLLLPLPPPPPPLPPPALRTRDFSCTTLSACFPPCPEKCDRSPKEFPRS

SEQ ID NO: 73489 - protein, 59 aa, Homo sapiens
MKCFQDCLAPRGIIAEALDMNRSRQRMKLMVCMVTVLLPIFELLEYKLCLCLECPSQSD

SEQ ID NO: 73490 - protein, 347 aa, Homo sapiens
MAFTDLLDALGSMGRFQLNHTALLLLPCGLLACHNFLQNFTAAVPPHHCRGPANHTEASTNDSGAWLRATIPLDQLGAPEPCRRFTKPQWALLSPNSSIPGAATEGCKDGWVYNRSVFPSTIVMEWDLVCEARTLRDLAQSVYMAGVLVGAAVFGSLADRLGCKGPLVWSYLQLAASGAATAYFSSFSAYCVFRFLMGMTFSGIILNSVSLVASRVIPLAPPAWQVPVSCTESAEGGCNEREEGGRGKADQGGDELLHPKRVCKCLHLQLNLGPLPNPGHPQGHMLSHGDLRGRQRSSGSGEQGGSCEPESRNGRLPAVAPAGLGLPFVHLPLSAREKQILSSKFQS

SEQ ID NO: 73491 - protein, 241 aa, Homo sapiens
MAFTDLLDALGSMGRFQLNHTALLLLPCGLLACHNFLQNFTAAVPPHHCRGPANHTEASTNDSGAWLRATIPLDQLGAPEPCRRFTKPQWALLSPNSSIPGAATEGCKDGWVYNRSVFPSTIVMEWDLVCEARTLRDLAQSVYMAGVLVGAAVFGSLADRLGCKGPLVWSYLQLAASGAATAYFSSFSAYCVFRFLMGMTFSGIILNSVSLLWSGCPHGAGLWRVFCWGIPSPWASSSWLG

SEQ ID NO: 73492 - protein, 197 aa, Homo sapiens
MLSHGDLVLQLCGLLWPGHGPAEVWAQPIPGAGPVWNHQHPGHAGGHRHHDLRGPPCHGGLLPHPGRAHGDRQHVCARRHADPVHSPGSAGQRLPGQLLHLCVPVYRRAVPHGDQADGDGLCLCPRPPRGPDGAPGYHTWGIQHHPATRELWGHRNPGWAGRLRPDRDPQHAPGGDHRSHGEEGQRRLFQETCRREE

SEQ ID NO: 73493 - protein, 9 aa, Homo sapiens
MTFLLFAFG

SEQ ID NO: 73494 - protein, 17 aa, Homo sapiens
IICPHLSPSVFLAMTLL

SEQ ID NO: 73495 - protein, 14 aa, Homo sapiens
IIPTSLSLLLACTS

SEQ ID NO: 73496 - protein, 24 aa, Homo sapiens
RGKMARTVAASAAQVVVEAEAQAA

SEQ ID NO: 73497 - protein, 88 aa, Homo sapiens
LAQVNSTSRRRPRPRVCILGWTSWGFGPSPVGGSRSAAWAQPTPRRRPWQAPWTWTRAARWRSCSAGASKPSMTPGRCGTRSWCACSS

SEQ ID NO: 73498 - protein, 32 aa, Homo sapiens
KMATSTFQFQCLVFMAIMTIPQGQMHFVPWTF

SEQ ID NO: 73499 - protein, 40 aa, Homo sapiens
MWMFPFLKWKVTSRAQKLTSRAQKWTLTHLMLMFMAQTGT

SEQ ID NO: 73500 - protein, 47 aa, Homo sapiens
MSWWTEASGATCTTALTTVRSASSAPTTIWYVFTSSPACTPITSRPS

SEQ ID NO: 73501 - protein, 52 aa, Homo sapiens
LSSCWMSFTQKINSTWFLNFCTKISRNSWMPLLSLAFLFPSSRAICSSCSRA

SEQ ID NO: 73502 - protein, 35 aa, Homo sapiens
LVRSSALGSFVSGSGLALCPRVFVPLRSALPGQEP

SEQ ID NO: 73503 - protein, 85 aa, Homo sapiens
MSTSLARSSTAVMAAGPTAAAAPMSTVSPAACSPTSNFSWSASSTGQPWHSRTSSWQSKITLSCAWPNAGPHLRACSMRTPTGTP

SEQ ID NO: 73504 - protein, 39 aa, Homo sapiens
LALLGLRFSGVPLCEAVPLFARLLVLPSRRPAPGSCSSW

SEQ ID NO: 73505 - protein, 33 aa, Homo sapiens
TRPRTRRPGHAPAKMAGAGAQLSVAAAAALPRS

SEQ ID NO: 73506 - protein, 81 aa, Homo sapiens
ISTAPRTFLSPSTATLMNGRYGRAALTQFCTLTCGGGQTSCWWLLLMPTLWGRWPVASVTTCLPASCGPGTAASPCSSARP

SEQ ID NO: 73507 - protein, 52 aa, Homo sapiens
KSMTSRWRSRICGWRTMGVTAVRSLTGWRMKAVWWSWSCGDGAVCPHISPTC

SEQ ID NO: 73508 - protein, 28 aa, Homo sapiens
RGPTCLPWLSMSLATPWAWATPQPPTPL

SEQ ID NO: 73509 - protein, 34 aa, Homo sapiens
MTMTRKKKGPSGSLVSGVPGAQGRRASESTTASS

SEQ ID NO: 73510 - protein, 50 aa, Homo sapiens
LAKGAVAAAAAAAAAATARKSLPGGEQDRTKPECRRQRIRSQSSCGQVYE

SEQ ID NO: 73511 - protein, 27 aa, Homo sapiens
LGSGIRSAPAVVAAAAAAIAAGQSLAP

SEQ ID NO: 73512 - protein, 73 aa, Homo sapiens
MGPSWMWMRMTLRRLMLPPATVWRIWPHWCTSMSPASCTPCASAMALACCTRMLAPACWFLAPVGPLLCTLRR

SEQ ID NO: 73513 - protein, 56 aa, Homo sapiens
MPSCCCCWWPSSWALRSPSHPPCRALPPSAQAWSSSQARVASPTPSCTTATTVTPR

SEQ ID NO: 73514 - protein, 33 aa, Homo sapiens
KTWLLMRKKTSLWSSVSVALSAPQVRATRARAR

SEQ ID NO: 73515 - protein, 97 aa, Homo sapiens
MVSFCVSCLTTCYPMPSTCVRSTCAPRCPSSCALRTLEPSCPPAVRSSASSGASSSKPLTSSMCRILARSSTPCLLCPGPRSPRTGGSCPSPPRRRV

SEQ ID NO: 73516 - protein, 31 aa, Homo sapiens
VHLLPVLSLPGAPAAVAVESPWKCRKRHSAS

SEQ ID NO: 73517 - protein, 26 aa, Homo sapiens
MRRFVAASGVWRGSGSVLRSWLPEAK

SEQ ID NO: 73518 - protein, 33 aa, Homo sapiens
MAAGTWAAAAAAAAAAERTRGVRGARSRAGAGP

SEQ ID NO: 73519 - protein, 38 aa, Homo sapiens
MPWRILSASRLLAAGPPAPTSRALERESSCLLRLYYAW

SEQ ID NO: 73520 - protein, 67 aa, Homo sapiens
VLFAARRFRRVAFVLRAPVGFGVSALKTATRAPMQLAPCRMGHGILNMRQIADQLPWVLLMTQESFA

SEQ ID NO: 73521 - protein, 173 aa, Homo sapiens
MQSSCRASPSLESSQKMPFHLLKPLMVAAATGNLALIPQSAGAMALRYSCTQRLEPSLRLIAGSWLPLRALASTHSALLGPASSSSSAWTPRLESAAQCLCNGTGAGTIWSSVSTRLPAPGPSSWDRLWWLRPAPRWTPSGPALMWPSLFSLKPTRCEVGLLASCGNTAPSPG

SEQ ID NO: 73522 - protein, 42 aa, Homo sapiens
MDVPPGRMKAERVASPPQGCSLIFLFSLASQHSAFCIHHGVW

SEQ ID NO: 73523 - protein, 55 aa, Homo sapiens
MGGTPPLYRLLLLCRPCRARLLCPPRAHCRDPAGWCLPMWPMPSMREWPGTSLDF

SEQ ID NO: 73524 - protein, 38 aa, Homo sapiens
RRSRMRPAAVAPASAGAAAAEAAAEAAATAAPPPADLD

SEQ ID NO: 73525 - protein, 34 aa, Homo sapiens
IPFFRLPVARRVRAAAAAARAAVAAAAAAVTCPA

SEQ ID NO: 73526 - protein, 33 aa, Homo sapiens
VCVPLPLLPPPLLLLLAPSLHQPEALCFPSWIC

SEQ ID NO: 73527 - protein, 39 aa, Homo sapiens
MLFPAKRWRSPISAVRAPAMRTTSGSSLMLASTSLWNTP

SEQ ID NO: 73528 - protein, 29 aa, Homo sapiens
RLGCRLSAAALGWCAVVRPRLTAASATQM

SEQ ID NO: 73529 - protein, 25 aa, Homo sapiens
TARRPRACTSLAVSSPSASGAFSVE

SEQ ID NO: 73530 - protein, 30 aa, Homo sapiens
KSRGPAVVAAMLGAAGPAAAACVPGAEQCR

SEQ ID NO: 73531 - protein, 52 aa, Homo sapiens
KLGFFKLGLPFSVSPWAAESQKILSSLYKAAGVPSFFPRGCFWLQLHEIPMV

SEQ ID NO: 73532 - protein, 25 aa, Homo sapiens
MLSLFGLACLQRPWPTSTLGASSAM

SEQ ID NO: 73533 - protein, 70 aa, Homo sapiens
MDGHWSAASSALTVTAMSSWARRRSSSSRRVSARGMHTRLIPSLPGSPVCWAWPWYPDTTSFPLRCRGRV

SEQ ID NO: 73534 - protein, 31 aa, Homo sapiens
MIRALLKKRVHTVSSCWFWITLECVSNPKPG

SEQ ID NO: 73535 - protein, 30 aa, Homo sapiens
MARMSGRSAVGVFTCSKGTVAPARPSSSTA

SEQ ID NO: 73536 - protein, 51 aa, Homo sapiens
RLGLGFLQLAPALPAPAAHPPRGRCRNRVTITAWWCSGRAAWARARWCCAS

SEQ ID NO: 73537 - protein, 91 aa, Homo sapiens
MLRYRGSGSLLCGPFLQSDFALLSSPHSPLHLPHQKREVGATTALSAQAPVSCFRVRGKEDPAKAATTIFPWGHGLGRQPGVQPPVVARAR

SEQ ID NO: 73538 - protein, 11 aa, Homo sapiens
LQRPEAYRGLS

SEQ ID NO: 73539 - protein, 45 aa, Homo sapiens
LRGPRVRTWGRGMVSARGGAGGAAAAADATAAAAAAAAPAPASRR

SEQ ID NO: 73540 - protein, 55 aa, Homo sapiens
LPTLVTYCSAGLFPLGSLALFLPQHDFYRDAVVEASRRSPAPVEKIPLVTPTLPP

SEQ ID NO: 73541 - protein, 35 aa, Homo sapiens
VKMSLLKAVPCFQAARLAFLCSRGLQVFLSVAAEL

SEQ ID NO: 73542 - protein, 41 aa, Homo sapiens
TLAAQHRGARIGRFVYRLLLLRKLVSVKVILAQMSNKYAPS

SEQ ID NO: 73543 - protein, 28 aa, Homo sapiens
MMITMVMIITTIVEAMKIPTTAMMMAMQ

SEQ ID NO: 73544 - protein, 22 aa, Homo sapiens
MKASRSGAFLSLMIRVFFGRSL

SEQ ID NO: 73545 - protein, 45 aa, Homo sapiens
MTKCRRLTSISTTCASLMRPSWRSLSGSARRWRKGLEPPLTLLQQ

SEQ ID NO: 73546 - protein, 32 aa, Homo sapiens
MASLFSCLFQSILMREGSAMLFLQTRMLMAFM

SEQ ID NO: 73547 - protein, 27 aa, Homo sapiens
RLSGWRRRLPLRCLAITFSIPAAFCPG

SEQ ID NO: 73548 - protein, 33 aa, Homo sapiens
LHCSSSASLLAAAASAARLLRRRGLRQLYRQSP

SEQ ID NO: 73549 - protein, 37 aa, Homo sapiens
TKLRTSSPEAAGLRPAAAAAAAAAQFLEQIQFAFLDL

SEQ ID NO: 73550 - protein, 32 aa, Homo sapiens
ILLLVRDAVSCVIPVIALQALSPSTWSLCPGR

SEQ ID NO: 73551 - protein, 36 aa, Homo sapiens
TTSSVRALTSGWVAAFSMPPGWAALVTTRWDDKLSH

SEQ ID NO: 73552 - protein, 37 aa, Homo sapiens
TTSSVRALTSGWVAAFSMPPGWAALVTTRGCTIAIWS

SEQ ID NO: 73553 - protein, 72 aa, Homo sapiens
IEVTGELAGLGARSRLSAFAAAEWPVRGSPRRGSVVPRRRLPPSALISGAGTAFHSAPVVRSLRLPFRIFRL

SEQ ID NO: 73554 - protein, 37 aa, Homo sapiens
LSCRLVAMSRLLVLTMEKSASTTIVPMIGSLPLGSSH

SEQ ID NO: 73555 - protein, 29 aa, Homo sapiens
ISKRVSFPTCLLGLRLSHAASFTGELETA

SEQ ID NO: 73556 - protein, 32 aa, Homo sapiens
MIFCLLTILVSFPCGPVWLAWFLSLGLVIKYI

SEQ ID NO: 73557 - protein, 38 aa, Homo sapiens
LCGEAGAAAAATAAAAAAAAAAAAASPPPGTPRCGWWH

SEQ ID NO: 73558 - protein, 44 aa, Homo sapiens
KKGFTSSLPCLKIVIAVTTSSLGKSDGHERRKVVVILQLRNKNH

SEQ ID NO: 73559 - protein, 22 aa, Homo sapiens
MNFSSQGWACLLTLGIVGRALV

SEQ ID NO: 73560 - protein, 34 aa, Homo sapiens
MKRTRLFSSSSTSPSQQTWAYSLSYILCSKMYML

SEQ ID NO: 73561 - protein, 29 aa, Homo sapiens
MLRHSSCKVAIFVPVVVCTLSPGIDSSPS

SEQ ID NO: 73562 - protein, 39 aa, Homo sapiens
LIGSLERKEALALLLLMTMILWIKSYCRNTIPSMVIMQK

SEQ ID NO: 73563 - protein, 28 aa, Homo sapiens
MLSSSSLSSSSAVVGTSGESTPGTLLHW

SEQ ID NO: 73564 - protein, 30 aa, Homo sapiens
MLSSSSLSSSSAVVGTSGESTPGTLLHCRS

SEQ ID NO: 73565 - protein, 61 aa, Homo sapiens
VQWPSVRMPRAAATAAAAAPAAVARVRAAAAPGPGERQSMEDTRMGGKADSQELHSSRGLW

SEQ ID NO: 73566 - protein, 28 aa, Homo sapiens
MPACPPSLCPPPLQLLALSASSPAGATL

SEQ ID NO: 73567 - protein, 30 aa, Homo sapiens
KSPQNCHVGMRFAGLVAAAAAGGPAHVKPA

SEQ ID NO: 73568 - protein, 87 aa, Homo sapiens
MRMLMGNLLVLTGLRQQIIKAKKKFIQQRDFSLPLVKDHVTWASLVTKNTASAVMIFSPCLTARVRPWLLEHPMSLWSALDFLLVLV

SEQ ID NO: 73569 - protein, 27 aa, Homo sapiens
KLRARFLPRELMCVLSTLSTLRAEIAS

SEQ ID NO: 73570 - protein, 40 aa, Homo sapiens
RQWAPLLVGASLGGTQSPCPAPSSTRTSSSAASRVSQPPL

SEQ ID NO: 73571 - protein, 45 aa, Homo sapiens
LLLVSVSCSAAAAVVTRKGTGRTVMVVAAAACAPLRYLPKLELML

SEQ ID NO: 73572 - protein, 26 aa, Homo sapiens
MMLKRKHVFSSSCIFMWSCSLPNVED

SEQ ID NO: 73573 - protein, 109 aa, Homo sapiens
MTTRARRRRKRRTWSPRRRRRRTATPRRPRILRTTRRMRWKRTTMTPIIRRRWKTTTTTPVTARKAASGAIVPTAALQVGENQEYIGLVLLYWKKKTSRPLNFPSPLRI

SEQ ID NO: 73574 - protein, 65 aa, Homo sapiens
IFVRPPRFVLGARALASLASRRAAPTPRWRRPRLPRRRPPRAAGPCPPWCPGQSPRARPWTPSWR

SEQ ID NO: 73575 - protein, 28 aa, Homo sapiens
MEKIIHVSPFSLICLSLKCKAWTKILLH

SEQ ID NO: 73576 - protein, 40 aa, Homo sapiens
INWSPARLQSLRMLSCLMSSASTKPCWALSGMNAIVGIFF

SEQ ID NO: 73577 - protein, 71 aa, Homo sapiens
VGSRLRGRWACSGASRRTRGPREMVWPCSDQSSPSRHHGEIASGQNPVHGGRVLLHAARLPAPREDHRDRF

SEQ ID NO: 73578 - protein, 50 aa, Homo sapiens
MASLKLMLSAGPFVGWVSQMIPFSDWPRPMASSQRTFDWRESQMWNICHK

SEQ ID NO: 73579 - protein, 41 aa, Homo sapiens
KAAMTWARNPSTRKPPPMSSTREACLWALAWTLAGREARGF

SEQ ID NO: 73580 - protein, 32 aa, Homo sapiens
KGPRLRMSMQMVVYVWTYFRTVGVQPMMCLPF

SEQ ID NO: 73581 - protein, 157 aa, Homo sapiens
MPFHLLKPLMVAAATGNLALIPQSAGAMALRYSCTQRLEPSLRLIAGSWLPLRALASTHSALLGPASSSSSAWTPRLESAAQCLCNGTGAGTIWSSVSTRLPAPGPSSWDRLWWLRPAPRWTPSGPALMWPSLFSLKPTRCEVGLLASCGNTAPSPG

SEQ ID NO: 73582 - protein, 53 aa, Homo sapiens
MFPTVTLLSPGPSTARSSPPWVLTLCLSSTANLLTGKPGDSLRWPKRATVSLC

SEQ ID NO: 73583 - protein, 64 aa, Homo sapiens
TLLMEMWSGISSGCILLGSPQSSLACASVSSVAVAVSSWGLHRRIALLSLLQCCGRSQRLCRRN

SEQ ID NO: 73584 - protein, 28 aa, Homo sapiens
KMAAAVAAAAAAALGARSRDRRREKQNL

SEQ ID NO: 73585 - protein, 43 aa, Homo sapiens
MMDVPPGRMKAERVASPPQGCSLIFLFSLASQHSAFCIHHGVW

SEQ ID NO: 73586 - protein, 51 aa, Homo sapiens
IAKISPLLLKPRLFILPPAWAAGCSSGWAWSQEQGECAPGPPSRVPGPWCG

SEQ ID NO: 73587 - protein, 48 aa, Homo sapiens
VALEAGKSEIKGPHLTWAFLLCLLFRRAGVGVAAPRKATPEITALVNS

SEQ ID NO: 73588 - protein, 38 aa, Homo sapiens
MLFVLIILCKCPHFVAVCLLGRGLLQLQFLDFGLTLFS

SEQ ID NO: 73589 - protein, 30 aa, Homo sapiens
KNFLRCSFFSSSPSWLTSAISGPTQMSLRK

SEQ ID NO: 73590 - protein, 58 aa, Homo sapiens
LLKLSRSCAGLAAASPPGATATAAASAAAVRGMLSSPLPGPRDPVFLGSRLLLQSCTN

SEQ ID NO: 73591 - protein, 30 aa, Homo sapiens
LLEGSNQPAPLALLLVCAAFQRENSCSKRK

SEQ ID NO: 73592 - protein, 29 aa, Homo sapiens
LGKNRIWSCHLCCACLIGDVHCLTPFKSS

SEQ ID NO: 73593 - protein, 31 aa, Homo sapiens
RASLSQLSGALLVAAVSSEFLALSMRRLVVF

SEQ ID NO: 73594 - protein, 47 aa, Homo sapiens
LSFTPPLSAATAAAAAAAAAAARIAAAPSLARRRYLLGQVRSSPEIL

SEQ ID NO: 73595 - protein, 66 aa, Homo sapiens
LHQSTVRFMKKNKLRTTLYVHLQMPQLMLVGCLSAFCDNEHMDFCLLNSVDPFSQLPGAWIFTSNC

SEQ ID NO: 73596 - protein, 57 aa, Homo sapiens
MPGHSWGQSDVAGVGMPKMKLGRMTQSGRRGLGLQVSALASVGPHSFASFAPCLSFL

SEQ ID NO: 73597 - protein, 101 aa, Homo sapiens
LCVCVCVCMCVCVHACAAGKGRGECEGPGGRWRRARGALAPPQSNLRPRPARGRALTGAVRSCGGRHYSPAPTSPPPLPTVKEREASTTPRPKQKALWITK

SEQ ID NO: 73598 - protein, 33 aa, Homo sapiens
MLLPKLCLISAGGAQLTGNVSPEAEKLPGKGLS

SEQ ID NO: 73599 - protein, 59 aa, Homo sapiens
LALFLSLQGALGGTGSSQILLLVYSYHLASVFLGNAAVLMHLVSFWSYSGQAFVTALWD

SEQ ID NO: 73600 - protein, 115 aa, Homo sapiens
IRAPRQLLRLPAGGPALARPASARCPAARTLPTLLSSPTLELPLCLSCCCAGAPTAERRLQSRRDAPTLRRRWRRRGGPGTLRHGRDDPLQGRGRSSEGKDLRRDQSSRRGRRFS

SEQ ID NO: 73601 - protein, 36 aa, Homo sapiens
LPPLGLSSSSLFLCSQSSIIDPTTCALKTECSISEL

SEQ ID NO: 73602 - protein, 40 aa, Homo sapiens
KMAARSSSGVAAAEGAAALAAAETAAVTVAAAARDLGLGE

SEQ ID NO: 73603 - protein, 51 aa, Homo sapiens
MLLRSPGPLLRFLSFGHALSSVGYWKTIKAQRWFTWRCGCYHRCLVTEPGA

SEQ ID NO: 73604 - protein, 76 aa, Homo sapiens
VKSVAFLLSSSRSLVVLQMPHASRGPGSPLPSPPLLAGPRAGSCGKEWRVGRWPRGWPGARPAPVVSGGTALPSRG

SEQ ID NO: 73605 - protein, 28 aa, Homo sapiens
MEVLGCGAAGCGCAQGDGMESLSWHSYK

SEQ ID NO: 73606 - protein, 40 aa, Homo sapiens
LLFKTRKRRRKRKKRKMLGNIYLTCSTARTLASCCYSCKY

SEQ ID NO: 73607 - protein, 31 aa, Homo sapiens
MAPLRRLTVWRVGLRLGPAGAAGGPGEASSV

SEQ ID NO: 73608 - protein, 141 aa, Homo sapiens
RRRGPGSGAKRPRCATSWGSSWPAMAATPRLWSSTGRSCSFGSALTTLWAVPWPTARSESAWPRWRTTRLPCSTSTSTWSWHIPCATTRSCRGPGPPSAAPTWTSMTTASRGMLCCRHRLPLRRAWLLWMRSWRGHWPRES

SEQ ID NO: 73609 - protein, 28 aa, Homo sapiens
LLLLMCTARAMLTGTSSQKICCLMNIIN

SEQ ID NO: 73610 - protein, 48 aa, Homo sapiens
LAAVATCLVASAAVGSWGDGGAGAGLAVQESQPWPPPSRIWSIWHLCT

SEQ ID NO: 73611 - protein, 30 aa, Homo sapiens
MVRAAPTAAAPAPRAAAPCSGDRAPRAPRS

SEQ ID NO: 73612 - protein, 55 aa, Homo sapiens
MGFGSLQALSAAARSAMVTWWSRDTSGAAVGGTRGERGRRLRPGTGCCHPSLPFL

SEQ ID NO: 73613 - protein, 67 aa, Homo sapiens [sequence omitted]

SEQ ID NO: 73614 - protein, 60 aa, Homo sapiens
MSSASMRTCPVQSTISTERYHQHILSLCCSKLGSTMMLAGSCLGGGWPPGHQESSTLIPH

SEQ ID NO: 73615 - protein, 128 aa, Homo sapiens
MSEHRNEALGNYLEMRLKSSFLRGLGSWKSNPLRLGGWTILLTLTMGQGEPGGPQGDPWVPHELLLPSLCDSSHASSWGSGSITCAWRGGDSSSHPLVSGHILSNSPVAAVMCSSMGTHLSPFKGTLL

SEQ ID NO: 73616 - protein, 88 aa, Homo sapiens
MTRHAKCVGIPAALATTRPAPRQDGGLNAAGSGGKLRSAFPQLLAASAPISAEDSGAPGTGRNYSAYLERRRDSDLPQSNPRAGTCCH

SEQ ID NO: 73617 - protein, 45 aa, Homo sapiens
MDQILESNKFTKGFALLSWLGCSGMNMAHCSLDLLYSSNPPSSVS

SEQ ID NO: 73618 - protein, 36 aa, Homo sapiens
MPRSRPPSQAPPAPPHPGLPAVLLPPPPLPASSTGP

SEQ ID NO: 73619 - protein, 43 aa, Homo sapiens
MSEKRKKKMAVLHCRNLLIIMLKMRAEAVAAGRLFPTSVISNG

SEQ ID NO: 73620 - protein, 124 aa, Homo sapiens
MGMKAACWRGRRTRRAGPLPSMLHPGPCAWAFSQWPPHSRTGHSPGRRLHGCRRPRGPWARQPLSTVARSGVLEPSGCLADKGRSVCPLLVLVEDPRSDVLGQSWSQTEPGVVCRAALGPGGCV

SEQ ID NO: 73621 - protein, 42 aa, Homo sapiens
MHVTTSLSFVFPTFQMGCSGPCCLPENNFKATLRALYGRWQL

SEQ ID NO: 73622 - protein, 52 aa, Homo sapiens
MNLSSPPCLALLTNRACLAVNWHRVTLFPGIQVCNQNTGEEKLQDPCPHLSS

SEQ ID NO: 73623 - protein, 35 aa, Homo sapiens
RMRPAAVAPASAGAAAAEAAAEAAATAAPPPADLD

SEQ ID NO: 73624 - protein, 112 aa, Homo sapiens [sequence omitted]

SEQ ID NO: 73625 - protein, 91 aa, Homo sapiens
KAAPGPTAAAAAQASAAARRQPREPLGSRPPAQPPPPREPVAGSRSGRKTTEGPSVRATPRGPNEQPEAAAAEDGDSDDAEAEKGTPGPAP

SEQ ID NO: 73626 - protein, 69 aa, Homo sapiens
VVIVAAAATAPAAISSSWAAASSSSSSSWAGLIPSPLPPPPGLGPRCLVPSRSRSCRRRRRLLIHPRAP

SEQ ID NO: 73627 - protein, 28 aa, Homo sapiens
LHSVDFQGKKKTVLVVVIINIWTSVMVK

SEQ ID NO: 73628 - protein, 31 aa, Homo sapiens
LLLVRDAVSCVIPVIALQALSPSTWSLCPGR

SEQ ID NO: 73629 - protein, 27 aa, Homo sapiens
VARRVRAAAAAARAAVAAAAAAVTCPA

SEQ ID NO: 73630 - protein, 53 aa, Homo sapiens
ILGSGITALMSQFCCHPALSMASQFPKSAWKMWGAPHRLANGKRMKIGLTSLS

SEQ ID NO: 73631 - protein, 70 aa, Homo sapiens
IGAHPRVPQAFGICLLSGARERGGQVPNLASGLSWQLALRSSPWNPGPTVLPAPCLFFSFSFSHCLFLNL

SEQ ID NO: 73632 - protein, 44 aa, Homo sapiens
RLRHLRDLRAPAGPVGVLCAAGTACGWPGPGPLLVERVRAFLRR

SEQ ID NO: 73633 - protein, 24 aa, Homo sapiens
KTHLFTILVLCKSSYLSGSQLSHL

SEQ ID NO: 73634 - protein, 39 aa, Homo sapiens
RYQHCKHQVCLETCLCLSFLSSVSTGYVSHCQIPDHKSP

SEQ ID NO: 73635 - protein, 25 aa, Homo sapiens
MTGTASRLAGSSALGFCAPWASSSS

SEQ ID NO: 73636 - protein, 37 aa, Homo sapiens
VEARTRGGAGTAAAAAAAGGTLIPVLRTPRASPWLTS

SEQ ID NO: 73637 - protein, 54 aa, Homo sapiens
MFFTLSVILVALSRELSFSGRMEFRRWWNLTQFKVPSGPRPLSMGLISILAVAL

SEQ ID NO: 73638 - protein, 47 aa, Homo sapiens
LCQLLLFWKMWTSTKWFHWKQIVVLTMHPFPQALNSQQVPTRMMMSS

SEQ ID NO: 73639 - protein, 44 aa, Homo sapiens
LHGRVWCPRRRLHRRHRRSATTTAASCPAATATACVAAASGPAV

SEQ ID NO: 73640 - protein, 23 aa, Homo sapiens
LWKDLGLLLSQLSMDSASRPFLT

SEQ ID NO: 73641 - protein, 77 aa, Homo sapiens
IGSSRCLFHHQMPWRPWSVPWAWPSAWWASSWAPSSSSWAHMCPVSPGNDPSERNDLWETPCRSSWVCDSPCVLSAL

SEQ ID NO: 73642 - protein, 27 aa, Homo sapiens
MCCVRTTAAATIFTCGVRARTACLSCS

SEQ ID NO: 73643 - protein, 28 aa, Homo sapiens
MMIKDTFILTLKPILLFSALNQGRSLWV

SEQ ID NO: 73644 - protein, 33 aa, Homo sapiens
KLCSMTSLMLLSGRTLSMSVTLCLYHLRVFPWA

SEQ ID NO: 73645 - protein, 54 aa, Homo sapiens
KINSANNRRRFMALAAAPPSFGLPRVFLTINQQMYRSALKMSSVSSERLLRQLH

SEQ ID NO: 73646 - protein, 27 aa, Homo sapiens
MRGLRSMPSILSNLISLDTNMALSALR

SEQ ID NO: 73647 - protein, 22 aa, Homo sapiens
MLIRASLGSGLLTCHQRSSTGF

SEQ ID NO: 73648 - protein, 46 aa, Homo sapiens
KPSLTAPALSLPSLLPARASCSQVGRWWQLQRPQCQRFRTRLQPCS

SEQ ID NO: 73649 - protein, 31 aa, Homo sapiens
MSATVRPMKMMFQCLAWPSHSKQKIFCMLRK

SEQ ID NO: 73650 - protein, 47 aa, Homo sapiens
LSFLWTKMSFLRVIFKFKRCSCRCCSIFAVTLRAWRDSSQEVSCSLC

SEQ ID NO: 73651 - protein, 62 aa, Homo sapiens
MPSLSRMFSGCGIKMLPAIYCLLSTRQITLCSGMPTLAPNYGRRAMQITFFLFLLTLLIPHI

SEQ ID NO: 73652 - protein, 37 aa, Homo sapiens
MRRHSKRAWPALPAGGLRCTCCASMAIERTQISRRTL

SEQ ID NO: 73653 - protein, 31 aa, Homo sapiens
MATSTFQFQCLVFMAIMTIPQGQMHFVPWTF

SEQ ID NO: 73654 - protein, 31 aa, Homo sapiens
VLAAVFQLSLGTAAVGRFQCIASPGCSSSWI

SEQ ID NO: 73655 - protein, 28 aa, Homo sapiens
MRKNSTFSFVRPCANQLLLLLVLKHSGK

SEQ ID NO: 73656 - protein, 52 aa, Homo sapiens
KLPIKKKRMSNKGKKLKRIILAIPPAAPATVAMRPVEAAPSGRQATITKPSL

SEQ ID NO: 73657 - protein, 17 aa, Homo sapiens
MLGTYPVYILPRHPAWK

SEQ ID NO: 73658 - protein, 26 aa, Homo sapiens
MISTPMTSAAFQMHLSQSSCWTVVLR

SEQ ID NO: 73659 - protein, 39 aa, Homo sapiens
MIVTGGIAVPTAALTWPTTTTSSPSPSRAVRGVPTSSTQ

SEQ ID NO: 73660 - protein, 30 aa, Homo sapiens
MKRRLLIMLLFQHKSSGLSVSLVSGNHRKL

SEQ ID NO: 73661 - protein, 34 aa, Homo sapiens
LRTRGQCGWLALPLAGAFPEDGVRSVGYSWMEHL

SEQ ID NO: 73662 - protein, 31 aa, Homo sapiens
KSPPCTWCCACEVALLSLLSASLPRNTTATR

SEQ ID NO: 73663 - protein, 25 aa, Homo sapiens
KSTSTCLTWVASAMNAASGSSASTM

SEQ ID NO: 73664 - protein, 30 aa, Homo sapiens
MSSKSRGICPWIACSAARPSHIQKTLINMS

SEQ ID NO: 73665 - protein, 25 aa, Homo sapiens
MAQSRLTATSVSQAQAILLPQTPRF

SEQ ID NO: 73666 - protein, 44 aa, Homo sapiens
IQAGMQCSGANLAHCSLCLLCSSDSSSASASRVAGITGAVTDEN

SEQ ID NO: 73667 - protein, 39 aa, Homo sapiens
LRRSRMRPAAVAPASAGAAAAEAAAEAAATAAPPPADLD

SEQ ID NO: 73668 - protein, 26 aa, Homo sapiens
RFGLVVPLRAAAAISVVGPAWWPKTG

SEQ ID NO: 73669 - protein, 35 aa, Homo sapiens
MRSVKSSGSPRAGARKIIASLLLPTPNSPVTRHPT

SEQ ID NO: 73670 - protein, 46 aa, Homo sapiens
MMAPASKTLTGASHLWGAALWSLQAPGRWGSQPSCTRSGCRGARSC

SEQ ID NO: 73671 - protein, 39 aa, Homo sapiens
MEWRHMSSTSLVPGASPSVPKASCTAASSALATVWPTRQ

SEQ ID NO: 73672 - protein, 54 aa, Homo sapiens
ILSQRETWRSRFHMMLTLRALQLSLPTKIGGACFRVSRLSPTEKKKKKMSLEEA

SEQ ID NO: 73673 - protein, 25 aa, Homo sapiens
RGVTSLLLSLSSSSAPRFRGCPSAL

SEQ ID NO: 73674 - protein, 58 aa, Homo sapiens
TPSPLHPISLFRWLLGGEQFCGFFSPIILTRSGLRVSPASAHCVHLALPCFPQPVARL

SEQ ID NO: 73675 - protein, 32 aa, Homo sapiens
MMTTKRLNKMVSNQKIKLIRPQPKFRLASVDT

SEQ ID NO: 73676 - protein, 31 aa, Homo sapiens
VCVSVCACVYFVLGRTQPMCSAWTLLILCLA

SEQ ID NO: 73677 - protein, 63 aa, Homo sapiens
MVVGVQLPGTILGSGITALMSQFCCHPALSMASQFPKSAWKMWGAPHRLANGKRMKIGLTSLS

SEQ ID NO: 73678 - protein, 60 aa, Homo sapiens
TGVGGLRSTRAEAGLGKRSRDLQGLYISAGSLRPFPGVIPSCAVVLWSSVLLSPSAFSPT

SEQ ID NO: 73679 - protein, 58 aa, Homo sapiens
RSVTAGAFWNAAILLPSSRGATSRVSQTAWSGFFALVLPRSLYSGRAVHGSVELSSLR

SEQ ID NO: 73680 - protein, 54 aa, Homo sapiens
LLRHQAEGYRQGSCDLNPLLPQYRILSLTLPFVFPPMFKMFGWFVVLPGDKVLT

SEQ ID NO: 73681 - protein, 28 aa, Homo sapiens
VAAAAVGTAGAVVLSARPSETWETRGRK

SEQ ID NO: 73682 - protein, 31 aa, Homo sapiens
KMTVWILRNFVLLVRGSLSRPCTVHWYGRCF

SEQ ID NO: 73683 - protein, 34 aa, Homo sapiens
MKEHLPCLKLLETRGPTTPVAFVGAVVAAAPASL

SEQ ID NO: 73684 - protein, 61 aa, Homo sapiens
MQQKPHRLERNKSSFLCPGAGCGALAEPSLQSPPGPLAVEGGASRGDRGTRRAEPGGPQGP

SEQ ID NO: 73685 - protein, 44 aa, Homo sapiens [sequence omitted]

SEQ ID NO: 73686 - protein, 33 aa, Homo sapiens
IWQTVKRVRLHCTRLPASGTGLCASFWWMQEHL

SEQ ID NO: 73687 - protein, 40 aa, Homo sapiens
MRISQLWLSACMHESSSFLLNSLALWTLLPRRAKTPELEA

SEQ ID NO: 73688 - protein, 44 aa, Homo sapiens
VPACSPPLWMTMRLTCSLTVLLGLSWKEKTQIHLRIWKQMKTPF

SEQ ID NO: 73689 - protein, 31 aa, Homo sapiens
MKATGAAPGTAFASTQNQCSGSEILDRKSIL

SEQ ID NO: 73690 - protein, 25 aa, Homo sapiens
IALLSLIASQASSWSVFAQCPASKA

SEQ ID NO: 73691 - protein, 31 aa, Homo sapiens
MSSSAWGQSLCSWASWAASAPSTRSAACWGW

SEQ ID NO: 73692 - protein, 37 aa, Homo sapiens
MSSSAWGQSLCSWASWAASAPSTRSAACWGCTLLSCS

SEQ ID NO: 73693 - protein, 38 aa, Homo sapiens [sequence omitted]

SEQ ID NO: 73694 - protein, 50 aa, Homo sapiens
IIPQRAAAAALGMLSLRAPLGRREASSGSGLRSVGASARLSPALAGLSGP

SEQ ID NO: 73695 - protein, 34 aa, Homo sapiens
MSSCPSCFVSWHLVWWFSSCFRIQSLWMMTASKW

SEQ ID NO: 73696 - protein, 37 aa, Homo sapiens
MLLNQTLSRLLCAASGASTWWAVHSPALLSLRGLVYP

SEQ ID NO: 73697 - protein, 22 aa, Homo sapiens
MSHLAACTCAWSVSPPVPLLLS

SEQ ID NO: 73698 - protein, 40 aa, Homo sapiens
LRSRRHRLGALSWPLFPQMSDSDSRTEKRKKKRPNGKATF

SEQ ID NO: 73699 - protein, 50 aa, Homo sapiens
IKYWSIELKNRLKPGWSAVMRSWLIATSASWVKGILMPQSPTELGLQVFI

SEQ ID NO: 73700 - protein, 49 aa, Homo sapiens
RRRRRHSAQRALAAAAAAAASEVPPPSQPPRWCSHPRSLCSSSLRSHHG

SEQ ID NO: 73701 - protein, 82 aa, Homo sapiens
MESSGRAGQRRLGPPLEGVLLFLLAPAALAGPSCGPFPQAGAAAALTHFLLQTARGPTCLPWLSMSLATPWAWATPQPPTPL

SEQ ID NO: 73702 - protein, 65 aa, Homo sapiens
MQCTLSYSPSHWLKSSSGLTPIHQRRQDSPCWLLPALLTSAASYGSTLRRVPGCILCLPNSASWV

SEQ ID NO: 73703 - protein, 19 aa, Homo sapiens
LAEFFFALILETSLCLVET

SEQ ID NO: 73704 - protein, 52 aa, Homo sapiens
IQACLSLSLSFMPLSPPHLGTASSKNSCYDTEFNQEVMPHSIRNYATAEEVY

SEQ ID NO: 73705 - protein, 70 aa, Homo sapiens
IPGWPENLSLVKSNIKICLLLILMLPAQQVHQRARMNYGCHECPCEAVGKPWLDCEGYLKSILESTRSSM

SEQ ID NO: 73706 - protein, 38 aa, Homo sapiens
MMRMKTFMVIHFYLMNSGAQLTGNVSPEAEKLPGKGLS

SEQ ID NO: 73707 - protein, 25 aa, Homo sapiens
ILSHTLGFLVVSFSKTVDLNLLAQA

SEQ ID NO: 73708 - protein, 50 aa, Homo sapiens
MLSFSSFFLFPPSLLSFPLSPPLPSAPLPTTFPLSTFSSTHCLSAGGVDI

SEQ ID NO: 73709 - protein, 55 aa, Homo sapiens
ILILSSCWMSFTQKINSTWFLNFCTKISRNSWMPLLSLAFLFPSSRAICSSCSRA

SEQ ID NO: 73710 - protein, 47 aa, Homo sapiens
LRARRAVLTAPRTLVSSLFSPRPSLGRAGTLAFPVPHGAAPTPDGVQ

SEQ ID NO: 73711 - protein, 51 aa, Homo sapiens
VAIARVGFAAAAAAAPGSRRDPRVVAAAAAQIPAPCRRRRPSSSAAPSNKE

SEQ ID NO: 73712 - protein, 34 aa, Homo sapiens
VRFLFGFLPASGATRVARQQPLGDLVLGSCPAWG

SEQ ID NO: 73713 - protein, 55 aa, Homo sapiens
LHKAREITAGGKSMMGSRVLRTGKLLEAAGAGPGSPALAVFAFGRGQSLLFQVPA

SEQ ID NO: 73714 - protein, 37 aa, Homo sapiens
LMLPCGTCHGAGTAALSRPAVVAAAAAAAGPERRSCH

SEQ ID NO: 73715 - protein, 51 aa, Homo sapiens
MGRAFPSRHKTARFECALVSASLTTAGTPGKNLSSYNSKCGGKTHQSRDGK

SEQ ID NO: 73716 - protein, 27 aa, Homo sapiens
IDLENKVSTRCFVVSVFLLFTLPESVL

SEQ ID NO: 73717 - protein, 45 aa, Homo sapiens
MRKRRKKMMTDPPRNPAMEASFWTRLMLTMSMRTRTSGRMEQRTF

SEQ ID NO: 73718 - protein, 71 aa, Homo sapiens
LMKTLYSLCVTPIGQSMSSMYTTIPRSNYSLNKMMTLKFPPMKTSSGMKRRMKSIQEMTVMGQSLLRSAHG

SEQ ID NO: 73719 - protein, 29 aa, Homo sapiens
LPPHSLSPLVLLTPGVSLSAFPNPPIPPV

SEQ ID NO: 73720 - protein, 112 aa, Homo sapiens
LRFGGGVGAARRRSCGTRMQTQAEALTAGMAGVATAAAGAWTQPQLRPVELPQRTRQVRAETPRLRPGGHECGRTYSPSACLSRPPWRRKSPMGPWHQMPSPTKGWLGRISQ

SEQ ID NO: 73721 - protein, 63 aa, Homo sapiens
MLGAPAFLAAIQHSVHAPRGQRLLPPGAIAASAVSTAQPLSLCLRQPCRAAHPEARARMGSLR

SEQ ID NO: 73722 - protein, 82 aa, Homo sapiens
MWPLQHISVASVSVVSFLCLAPHGFKSTRAGVETAHLALILSDWWFWPVSRTTPGQFRGSFKGTRKGPGALFAQLCWGAALL

SEQ ID NO: 73723 - protein, 32 aa, Homo sapiens
MFAPPSLSTVSFFPPPLSLAVSSSLEECISSL

SEQ ID NO: 73724 - protein, 29 aa, Homo sapiens
MRATFWVIFLKKKPFVLDALFSFFSLAGK

SEQ ID NO: 73725 - protein, 39 aa, Homo sapiens
MLPAIVGVSAVTRHFQPVATAGRQRRSSSRGACRLLQGK

SEQ ID NO: 73726 - protein, 80 aa, Homo sapiens
MSDSCQRQQQGDTKWRRLSSYPWRRRQRWRRRRHLLQAAAAVSQAAAAPPAGAVAVARSQVLISQLKMFFTRMQSFLLVK

SEQ ID NO: 73727 - protein, 24 aa, Homo sapiens
MRARNHSLCRSFAGFCFVTQAGVQ

SEQ ID NO: 73728 - protein, 48 aa, Homo sapiens
MTSLSIPSQNCSKRLLSSSLCSSCACSKALWKAEPTQFKGPDSGDLVS

SEQ ID NO: 73729 - protein, 31 aa, Homo sapiens
MLPRLVSNSCAQVICLPWPPRVLGLQLRLRF

SEQ ID NO: 73730 - protein, 55 aa, Homo sapiens
MLCCLVRMNGLKCTFPPLLLERERGIFQKPLCSFCFLCGMMPSSVEWALCRIRVE

SEQ ID NO: 73731 - protein, 34 aa, Homo sapiens
MACVLLSWSQCTVCSVNSSHQALLTPRVSVPLVL

SEQ ID NO: 73732 - protein, 42 aa, Homo sapiens
MAATSQLAMNMLLTVTHTHSSLFRPSWAVPSSIGCLMTAGKR

SEQ ID NO: 73733 - protein, 37 aa, Homo sapiens
MSRVELAESRALLHPTGLCVLGLARGEPRWQSSRTRP

SEQ ID NO: 73734 - protein, 151 aa, Homo sapiens
MCATTLGTTSWATSMSSSGGRRMESGPWLNSVTAGSTGRLCTGMYPRWLLQLHASAAHFPEPPEAALWAGTQAQVPQDQPAMSPHVLRPLYPQMSLTLSPSNHVPKNLFFFFFFLRWSLTLLPRLECIGTILVHGNFRLPGSSNSLPQPPK

SEQ ID NO: 73735 - protein, 35 aa, Homo sapiens
MISAHCSLNLLGSSSLSASECWDYRREPPRQAYEI

SEQ ID NO: 73736 - protein, 53 aa, Homo sapiens
MAPACAKLVLLGTTLPEPCFLPSSGAPDTRASWWAWARRTPTWATRPRASVAS

SEQ ID NO: 73737 - protein, 38 aa, Homo sapiens
LRVLLCLISLLLLCYMCVCHFQFFVKDTKNLGLHNTSR

SEQ ID NO: 73738 - protein, 37 aa, Homo sapiens
MVHLGILGTSVFQATTSLSTSSSYFVSGLCTCHRIRY

SEQ ID NO: 73739 - protein, 64 aa, Homo sapiens
LPSAPGFWLLMLQTIKYWSIELKNRLKPGWSAVMRSWLIATSASWVKGILMPQSPTELGLQVFI

SEQ ID NO: 73740 - protein, 23 aa, Homo sapiens
VCCTFTLLCLGTVLFLFCKCLLP

SEQ ID NO: 73741 - protein, 33 aa, Homo sapiens
RYSMSGLMPLLAICPSQPTTQTSGRDGGRTQSK

SEQ ID NO: 73742 - protein, 49 aa, Homo sapiens
RYSMSGLMPLLAICPSQPTTQTSGRDGGRTQSKWTCISSWPKTMFLSIA

SEQ ID NO: 73743 - protein, 36 aa, Homo sapiens
RYSMSGLMPLLAICPSQPTTQTSGRDGGRTQSNPRS

SEQ ID NO: 73744 - protein, 103 aa, Homo sapiens
LAGSGPVKQPGSWLCAAWGAVLAWGAVLACAGASAPPGSCIPVSRAAALRAWKTGTGHSLPRRHPGSPRFTPKRETKGFLVPSQEKGDPKMTKCLKPWELQMN

SEQ ID NO: 73745 - protein, 33 aa, Homo sapiens
LGAPWFRRQPPASSSFCCCSWGLCLLPTPALCP

SEQ ID NO: 73746 - protein, 56 aa, Homo sapiens
TWFPKMSMLPLPPSKPSAASSLWIGAPLASRLASTTSLPLWCLVETWPRYRELCAC

SEQ ID NO: 73747 - protein, 97 aa, Homo sapiens
ITLFVASASVSGWALTSHLRRGSEPGPDPGDCRPLLSSLTRGFPPRTPTSGLAFPSLLRVWREPALRPERAWGPPAVKTSRGPIHHGGRRRRERQEK

SEQ ID NO: 73748 - protein, 100 aa, Homo sapiens
ITLFVASASVSGWALTSHLRRGSEPGPDPGDCRPLLSSLTRGFPPRTPTSGLAFPSLLRVWREPALRPERAWGPPAVKTSRGPIHHGGRRRRERQEKDKF

SEQ ID NO: 73749 - protein, 34 aa, Homo sapiens
LEEPAGLNQGDAEDDDLLPRPLEPSACARHPRLA

SEQ ID NO: 73750 - protein, 120 aa, Homo sapiens
RMSNKGKKLKRIILAIPPAAPATVAMRPVEAAPSGRQAIVVEIGIGIDGEIVGAEVQVGSVVTVAVAGIVDMVVSREVGTIVVRIVCITGVLHLPLVIGMDTVRVLISERRAQSGSQLII

SEQ ID NO: 73751 - protein, 53 aa, Homo sapiens
RMMKKRLRKERMTETAPMARMTLKHIVGFRNLIPLFLYLGACLRSNFSPDPLP

SEQ ID NO: 73752 - protein, 41 aa, Homo sapiens
LAGAFSITEPRGMLRLMHLESFFLVFPYSASLEMEKLDVIG

SEQ ID NO: 73753 - protein, 29 aa, Homo sapiens
LPCPLLASVAAALAASGGAAAYCLSPRRR

SEQ ID NO: 73754 - protein, 76 aa, Homo sapiens
IAALSVSAAPLSGPGLRGPPAPWASAASPPPRPCWSFSTSSSGGQLAFYAMWEPMSSSLMMTMTTSLKMCTRSSLL

SEQ ID NO: 73755 - protein, 27 aa, Homo sapiens
TRARRWGAAAWSTVGVPSVSVILQSEE

SEQ ID NO: 73756 - protein, 21 aa, Homo sapiens
TDPHSSQGPQTSVSLGSSLMT

SEQ ID NO: 73757 - protein, 54 aa, Homo sapiens
LERSRERAQAAVLIPFWPAVFRSVSTALQEWQILGSLLASLWQWSGISHPQWRL

SEQ ID NO: 73758 - protein, 46 aa, Homo sapiens
KCLSLWSLLSPAACRLSLCMTGMDSEFCSTSPRREPLGTQRYRCCS

SEQ ID NO: 73759 - protein, 74 aa, Homo sapiens
TAAVPAAATVVAVPAAAAAATGAAAPAAAAAPAADTAAAAPAEATSPPLPGPWASLHLRDQGQQKLAGILTKPE

SEQ ID NO: 73760 - protein, 38 aa, Homo sapiens
VAAAAAAGAAWIGALSCGISSRCSSATRSGGWTCWTDM

SEQ ID NO: 73761 - protein, 34 aa, Homo sapiens
MLARMFNNFCLQAIFPPGPPQVLSLQASATTPSL

SEQ ID NO: 73762 - protein, 51 aa, Homo sapiens
MMPIGRKPSGPPWMSATILTLTARTASTTLTTGTAAATPTTRWTGEKVQGQ

SEQ ID NO: 73763 - protein, 34 aa, Homo sapiens
MNLTGLSSALCGHSSATQSPRESPAAPRAPGPSQ

SEQ ID NO: 73764 - protein, 34 aa, Homo sapiens
VSLFLLKPLSLTVPANRSGRPQHTRRTDTGSKLH

SEQ ID NO: 73765 - protein, 28 aa, Homo sapiens
TFALGSLPTLPPISSASRTPWRSPARSN

SEQ ID NO: 73766 - protein, 54 aa, Homo sapiens
IFSPRSSPQGCASSSTSRSALSSTTQGRSCSTPSWTPCLCAVLWTSLLALTIPS

SEQ ID NO: 73767 - protein, 89 aa, Homo sapiens
MRLRSRSQGQRRRTGPLQCPVMIQPLQRPPAATPAACAGAAAVAAPGTKSGGARGRPPGRASCSPSPAVKYVPRQVLRRCRAGRSLLTS

SEQ ID NO: 73768 - protein, 51 aa, Homo sapiens
MRLQMCLPKSTASRVRRRAGWPRRRRSCVLGARSSTWTPPRVSSISLSTSC

SEQ ID NO: 73769 - protein, 8 aa, Homo sapiens
KVIIDLAL

SEQ ID NO: 73770 - protein, 35 aa, Homo sapiens
TEAAAAAAAAAAAAAAAAAVAAAAGKESVFPKKIT

SEQ ID NO: 73771 - protein, 36 aa, Homo sapiens
KKRKKEKRKMRSKKMMEKKRSHRVLFKTALCSFIIW

SEQ ID NO: 73772 - protein, 66 aa, Homo sapiens
MPMATALPLDFPTFLLLARATNHGFLFPEERVSASPLLKRETKDWRPNRAVGEMGPWVTCQIFVRN

SEQ ID NO: 73773 - protein, 25 aa, Homo sapiens
RFGLVVPLRAAAAISVVGPEVYADL

SEQ ID NO: 73774 - protein, 28 aa, Homo sapiens
RQRVLILCGTASAFVLCPPRPRRPFEAA

SEQ ID NO: 73775 - protein, 48 aa, Homo sapiens
MHYGGKNEKEEIKKLNRMMARLILVTLSSVSPTRLTRGMNSPTGSRTL

SEQ ID NO: 73776 - protein, 24 aa, Homo sapiens
MMRAWLTATSASQLQVILLPQPPE

SEQ ID NO: 73777 - protein, 25 aa, Homo sapiens
KVSGAAQLCLSLYLCEGREWAEQNF

SEQ ID NO: 73778 - protein, 24 aa, Homo sapiens
KWSWSWSASCPSPSPARSAACVTS

SEQ ID NO: 73779 - protein, 25 aa, Homo sapiens
IAVRRRSRWWDLTVGPISLFSALLA

SEQ ID NO: 73780 - protein, 41 aa, Homo sapiens
MKGLFLLTTNVSVPGLLPGSSVLPKILMRTLWRETSELLFL

SEQ ID NO: 73781 - protein, 48 aa, Homo sapiens
REGASGCSWSGLLSGDGPFLPALLFLLSALPPPAPCASPRSLGPGGGR

SEQ ID NO: 73782 - protein, 65 aa, Homo sapiens
IGGDSRGSGGDSPASGGGRRHQRQCRDRIRAALRYLSLSLLPPYLARSLARSLRGSLSSSGRRRV

SEQ ID NO: 73783 - protein, 22 aa, Homo sapiens
KVLGWRACLCLQTGRAAAWLFP

SEQ ID NO: 73784 - protein, 34 aa, Homo sapiens
KVTRENFSIRGKMALSVLLGIMTLLGALGCQLLF

SEQ ID NO: 73785 - protein, 78 aa, Homo sapiens
MPCNLLKCCPFPVIRQTPRRGPPRARPLPLSLAFCLSRSLSPLRFATLRLPSMDCIESRLRRELPLRFTLDFQAFFPY

SEQ ID NO: 73786 - protein, 58 aa, Homo sapiens
TFPSALFSPGRAAAAAAAAAAAGGGARWRRWPGSPWRTVKEAAKKKSATTTTPIHLLT

SEQ ID NO: 73787 - protein, 107 aa, Homo sapiens
MTPLLLTPQSAVPLPSLGRASREPGVAFQLVSRFSPGLGGGSLRGAGRSFACGVNARSTCSFSSRPLRASPVSPRRAAAAAAAAERGGGGGSPRRRQQLQRNGGDRG

SEQ ID NO: 73788 - protein, 48 aa, Homo sapiens [sequence omitted]

SEQ ID NO: 73789 - protein, 51 aa, Homo sapiens
VALSGSNKSKLWVCECLCVLLFTSHLLKSVYVRGWGVCVKESEEEKEREIN

SEQ ID NO: 73790 - protein, 30 aa, Homo sapiens
VGSSARRQGWRGLCAPTSAAAWLCWPSCPP

SEQ ID NO: 73791 - protein, 55 aa, Homo sapiens
TPTAPLRAGWAAGSRLQRWVDLGSGFQHVAALGLPLLPAGVGQCPEQALFPSPVG

SEQ ID NO: 73792 - protein, 112 aa, Homo sapiens
MLFAAVRTGLSARPRRSLASSLRAPGRPSPGRAEEGADFGFASRSLLCPGASQGRRLEASGRGETYPCVYPPHALPPSFPVLEPWPGKPRQGKRTVAALLERDHLQTPTKVK

SEQ ID NO: 73793 - protein, 62 aa, Homo sapiens
ICFATAWRQKIFQRLKTEMKTQVPKMKGSLLLCSLMSHMEGSPPAPQLSGTCWKGSFWNTSS

SEQ ID NO: 73794 - protein, 36 aa, Homo sapiens
RACSLFSAGVAGSEGSWSAFCRSLWLHAHRLRGYLP

SEQ ID NO: 73795 - protein, 59 aa, Homo sapiens
KRKQEAFAVIPATALANAVPASVASAPRTAQHLPLSPRRPPAASGAPVWFPKKDLQQNE

SEQ ID NO: 73796 - protein, 61 aa, Homo sapiens
LVPLRLLSRPGPLESSLTPGELSLPPRCRPIFRGRKMPSNAPTNFLRLAKSSLLWMFFMML

SEQ ID NO: 73797 - protein, 41 aa, Homo sapiens
MAAYFAVWASVPSPASICCGTCSQGWCGTNASRHHGRVWTK

SEQ ID NO: 73798 - protein, 99 aa, Homo sapiens
LLAVTGGAAALSALSPPGENEPQCPPARSQPCPGQRKTTRIPGSGRRPGWAAPVRAGDSAPPLAAVSGNWVPALRGFQRTGTPFPGSPAHPAGEGGRCR

SEQ ID NO: 73799 - protein, 44 aa, Homo sapiens
MCGAEAAAGAAAPSSASASASASRRCRRRRRRRRLFFRTWRAQV

SEQ ID NO: 73800 - protein, 101 aa, Homo sapiens
IFGDRRRLVGVAALFSPCSPSPSPLGLLSSCLREAAELGPRGERPSPPRRSLLRQPPAPAREETGLPGLGRAGRPRGRGGPLLRRRGSEAPALRLWAMGDL

SEQ ID NO: 73801 - protein, 30 aa, Homo sapiens
LKKPQSHMWRRMTMMSWTASSIISLHHRSP

SEQ ID NO: 73802 - protein, 87 aa, Homo sapiens
KQQPLLFVSAISSAVAKQQPCVSASPSTLARLVSRLAMPAGSSTAWNTASSPMARCQVTRPLGEEMIPSTPSSVRRGLASMCPGQCL

SEQ ID NO: 73803 - protein, 65 aa, Homo sapiens
LGRRRPASTSGLLPSAACAPPAKSPPSRPHLAPPIPPGWSPLWVPIGSCECLGVGSLFLARGTNF

SEQ ID NO: 73804 - protein, 31 aa, Homo sapiens
MGKAAAMARARAVAAVAGGGGASSSSPRRRR

SEQ ID NO: 73805 - protein, 63 aa, Homo sapiens
TADETERLKRAGVRGLLFHQMESHSLPQAGVQRRDLSSLQPLLPRFKRFFCLSLRIPGITASR

SEQ ID NO: 73806 - protein, 40 aa, Homo sapiens
MIVTGGIAVPTAALTWPTTTTSSPSPSRAVRGVPTSSTQW

SEQ ID NO: 73807 - protein, 46 aa, Homo sapiens
TPPPRTRSLAPAAARPQDNGSILLGSAIVSSAGPGSSCKPLTFVPW

SEQ ID NO: 73808 - protein, 93 aa, Homo sapiens
MRRGGRVPGGSSRRRWRWRAAAAETGALSRTPRPAPRRHPRRSVLFPLCFSPVLGQSCPRSRVGLRVCAGAAGAISPLGGRWSPGARGRDHGG

SEQ ID NO: 73809 - protein, 79 aa, Homo sapiens
LFFRRSAVAFLCRSQWKKRSPRWSLTMAPACAKLVLLGTTLPEPCFLPSSGAPDTRASWWAWARRTPTWATRPRASVAS

SEQ ID NO: 73810 - protein, 33 aa, Homo sapiens
MEPKTKMTEITSNSSQTFLVATLGILRFSLACP

SEQ ID NO: 73811 - protein, 75 aa, Homo sapiens
RGKVWRDPAPAPPPATTVGAAEEMDINPGVKSQGMKPAGAGNLGFRTLRRLLGCLTLTLSGRILNPSWVSSTGMP

SEQ ID NO: 73812 - protein, 66 aa, Homo sapiens
TQSLGLFGLLPPPGSALRCRGELSARSPWGAPHIGPRCCCCCRLCCCCCCCASRPAAASQDRETHH

SEQ ID NO: 73813 - protein, 69 aa, Homo sapiens
TQSLGLFGLLPPPGSALRCRGELSARSPWGAPHIGPRCCCCCRLCCCCCCCASRPAAASQIPRGAPPSR

SEQ ID NO: 73814 - protein, 37 aa, Homo sapiens
IGPMQTWFQKFVFFWWVQLGLESPVFSIQSSLFFMAM

SEQ ID NO: 73815 - protein, 40 aa, Homo sapiens
KVLLAGYFIDTLKVLHMIRKQLWKMTAFISLNILPYGTDQ

SEQ ID NO: 73816 - protein, 25 aa, Homo sapiens
MNLCWKIITLLWVSNCCKKNTVTSS

SEQ ID NO: 73817 - protein, 49 aa, Homo sapiens
LLHLRPEPRSAQDWNAFPSGLSWSLGLGAALLRYNSCACGFGWHNLCLG

SEQ ID NO: 73818 - protein, 24 aa, Homo sapiens
MSCFSSTCSFGSVAAAFWALGSTC

SEQ ID NO: 73819 - protein, 24 aa, Homo sapiens
IGRAVTVVCPGAAGAAAAAGHGAR

SEQ ID NO: 73820 - protein, 25 aa, Homo sapiens
KQSAVLAGLVVSTIRISNCWVLGAC

SEQ ID NO: 73821 - protein, 108 aa, Homo sapiens
LLLLLLLLLLLLLLLLLLLLLLLGPGWRHLTTPRSSHFPSSPPPPSPPPPPLPPFITLCVILHSSREGTQKWGAGKPTYDSGHRGQRRYRTFLLSQCTLKMSVSTCGK

SEQ ID NO: 73822 - protein, 32 aa, Homo sapiens
MVIMKRWLPWRPKSVIKLSIILATSICHGTSF

SEQ ID NO: 73823 - protein, 24 aa, Homo sapiens
MNCCALALRCLMTMESWIIVICQE

SEQ ID NO: 73824 - protein, 58 aa, Homo sapiens
REKCPHLLLSSSLTPSHPLASDPFSTGDLPLLRSSSSSFTSPPSSSLALIMLMLEENE

SEQ ID NO: 73825 - protein, 20 aa, Homo sapiens
LFLLKAIQTLTQTVVKKKMK

SEQ ID NO: 73826 - protein, 38 aa, Homo sapiens
LVYSYHLASVFLGNAAVLMHLVSFWSYSGQAFVTALWD

SEQ ID NO: 73827 - protein, 46 aa, Homo sapiens
IDDTIFHVLLKQGVGKSILRGHFHHQFSFFFLVVALFWGGWVCWFH

SEQ ID NO: 73828 - protein, 23 aa, Homo sapiens
RAATTTALISVVTTASAGGEDER

SEQ ID NO: 73829 - protein, 35 aa, Homo sapiens
MTLTENLKKSVRVLKLSVGPKKCPISSLTLELRTF

SEQ ID NO: 73830 - protein, 25 aa, Homo sapiens
LKTSMMTCMCSFLVLIQKIIHKSHS

SEQ ID NO: 73831 - protein, 39 aa, Homo sapiens
IPVCLLPAFLGFFRRRGASLRNSRPLRATALAVSFASSS

SEQ ID NO: 73832 - protein, 40 aa, Homo sapiens
MRPHKPKKKTSICSSICLLWFKNFFNLTSRCVNCDIWECL

SEQ ID NO: 73833 - protein, 49 aa, Homo sapiens
LGNFRSSVLSFRPWRSMLLPKLCLISAGGAQLTGNVSPEAEKLPGKGLS

SEQ ID NO: 73834 - protein, 59 aa, Homo sapiens
LVRTPLTSVYLRVRPILPAGLCLGVTLPELAPTTVATVMLMCDCCQEPAHMTVWRKFFP

SEQ ID NO: 73835 - protein, 78 aa, Homo sapiens
ISVMSDSCQRQQQGDTKWRRLSSYPWRRRQRWRRRRHLLQAAAAVSQAAAAPPAGAVAVARSQICLKTWIISIFVMDC

SEQ ID NO: 73836 - protein, 44 aa, Homo sapiens
ISLISMETSELVLLLLTPHLAPSLPPRVFASICGLALYLGTGSL

SEQ ID NO: 73837 - protein, 27 aa, Homo sapiens
TCLCLSFLSSVSTGYVSHCQIPDHKSP

SEQ ID NO: 73838 - protein, 12 aa, Homo sapiens
KCSFLTFLLQLV

SEQ ID NO: 73839 - protein, 37 aa, Homo sapiens
RVLRILIVSRGVHSPPLASAQGATAAIATSSLSQGPV

SEQ ID NO: 73840 - protein, 41 aa, Homo sapiens
KEDDSTSFSFLPSLPCPALLPLLAVVVCQHLAGDFLNLQGE

SEQ ID NO: 73841 - protein, 56 aa, Homo sapiens
MSRLAAFCLPVCVTRPGVRPNLRSADCSLIDVAVNSSALGVQLVSGSETPDLFSAR

SEQ ID NO: 73842 - protein, 51 aa, Homo sapiens
MDDACSFGFAVVLLGVWSEDRAEKRRSSFSRSFFLPKRGLSTQNISGWDSL

SEQ ID NO: 73843 - protein, 52 aa, Homo sapiens
VYHTWADTSLSSIFTKQRTRRFPRRCRWMAGGHGQAPSMPLFAPMCLAAGIK

SEQ ID NO: 73844 - protein, 28 aa, Homo sapiens
LVLAAASLCCAHMTHNSGSGPGTSNIIK

SEQ ID NO: 73845 - protein, 48 aa, Homo sapiens
LAASLTGAFLTAAHGPHWSPPTASRILPPPSQAGLMSVLTLLPLLPGP

SEQ ID NO: 73846 - protein, 93 aa, Homo sapiens
LKSRWRGGRKKMGKCYKHSVHVVSLSAVLSSQPTSLEQVSLKHNNRHWGALQQKITSQRTGWCRRLNASLRKQKYYRSTPEPAVSPRCLSMNC

SEQ ID NO: 73847 - protein, 90 aa, Homo sapiens
LPLSLPHSLFALLSWDDAARRPLPDASNLILNFSSSRMVMATVAEPRKPRRNQRMETHGSNGKSSDPGFPKEHWSRKMLCEKVFPGRRNL

SEQ ID NO: 73848 - protein, 46 aa, Homo sapiens
METFEIFYLKCIRVNLISRQLNTFFLAVLLVVCMPCFHSVCTGKRT

SEQ ID NO: 73849 - protein, 44 aa, Homo sapiens
MAMVISFLIPMVCYNVTLRFFPSVNRSHFLTPCLWMGLVACFEQ

SEQ ID NO: 73850 - protein, 74 aa, Homo sapiens
MLRRGLWLLGRKTTEVKAILIAPYPGSTLAVIPCMRCLPGFSTVKLLFLPPFLTVLWEKVAVCSPCLMSGEFCS

SEQ ID NO: 73851 - protein, 68 aa, Homo sapiens
LTSIPSKNKRPSETERGGLGLGSRPRCVLKVMCARFRKAAHSRFLGVSAAVGSWGQGPGCWGVGRGSR

SEQ ID NO: 73852 - protein, 161 aa, Homo sapiens [sequence omitted]

SEQ ID NO: 73853 - protein, 85 aa, Homo sapiens
MRECSSDAVTWAGALGLASALVAARPALWSHGLPGRTPRLSPSRPQPPDDPLLPSLSPTVGLAEDGARPGPRGAAQVLGGREPGA

SEQ ID NO: 73854 - protein, 80 aa, Homo sapiens
LRGACSSLPLITVAFSWHPNLSRRSPVLGLVRRMRSLLPSPQPHPLQGQALSHPWKMVPGSQLPCICLISPDQRLSLGSS

SEQ ID NO: 73855 - protein, 52 aa, Homo sapiens
MRTPCSSSQRKHGSPKLIPQPLALLFLVPSVQKGGEGLLSGIKSSEPVSVAE

SEQ ID NO: 73856 - protein, 50 aa, Homo sapiens
LGPRHPKPRDTCWRADGICLAWAGVLALLLLSCRATSDDRLFPLSLSFSS

SEQ ID NO: 73857 - protein, 64 aa, Homo sapiens
MRGACRGGTAWAGSFLPPTRAPGQVSAPCPGAHRCPPSALLPLAPDPPAVPPAALPCRSTPPCL

SEQ ID NO: 73858 - protein, 122 aa, Homo sapiens [sequence omitted]

SEQ ID NO: 73859 - protein, 114 aa, Homo sapiens [sequence omitted]

SEQ ID NO: 73860 - protein, 36 aa, Homo sapiens
MAPVFSGSCSCTARGHPCSALRTATPRLRDPDTGSE

SEQ ID NO: 73861 - protein, 60 aa, Homo sapiens
MTAFGLGIPTFLVMQPSGSQPRFPALTQNGVALVRTPLTSVYLRVRRPDFAMLARLVLNS

SEQ ID NO: 73862 - protein, 47 aa, Homo sapiens
IGSFFFLPSLFLFLRLVACKKITVRCSPALGARYSAPLSPVHCATQR

SEQ ID NO: 73863 - protein, 38 aa, Homo sapiens
MSWESFKSPLSSYLTILARGGFSSLPIWAHFCQPQPCS

SEQ ID NO: 73864 - protein, 164 aa, Homo sapiens
MKRVFWCLGTTILPPTLDIRGGPSHPCPPMLSLPTLGPLTHSPLSSPPPTVSQGTPMAPAPTPKGATHRVPTPKGATHRAPTHKRATHRAPTPKGATPRGHIPRAPSPPTPMDSHRSSQDKTLTHPSMETTRRRVPHPTMTTRTSLPPTGMTRASDRPSSARCS

SEQ ID NO: 73865 - protein, 36 aa, Homo sapiens
TRKRRRKRKKRKMLGNIYLTCSTARTLASCCYSCKY

SEQ ID NO: 73866 - protein, 33 aa, Homo sapiens
RRRKRKKRKMLGNIYLTCSTARTLASCCYSCKY

SEQ ID NO: 73867 - protein, 27 aa, Homo sapiens
LLPPPLLLLLAPSLHQPEALCFPSWIC

SEQ ID NO: 73868 - protein, 23 aa, Homo sapiens
LLACASGLALSPDSRCKGALCER

SEQ ID NO: 73869 - protein, 64 aa, Homo sapiens
LLLLFMSVPVVSAPPFCPPAEGSRDGRPKASVARPAAVHEHHSPRDCGHLPDVLRSSLGGWQPH

SEQ ID NO: 73870 - protein, 44 aa, Homo sapiens
LPVALTATLASGAGHGRPPPDRPAPVLTALALAFEPEASSARTT

SEQ ID NO: 73871 - protein, 32 aa, Homo sapiens
MGLCWMRVLLTQVYTSISGQQKRRMTQAWCIK

SEQ ID NO: 73872 - protein, 43 aa, Homo sapiens
KRKLLMLKMYHLSFQHLTTTSSVSTGISSSLYLSYRPKCHLSL

SEQ ID NO: 73873 - protein, 42 aa, Homo sapiens
MRRRAPPAPGPPPCSAARRGLLSRAPLGALRLWFPPAPWNNP

SEQ ID NO: 73874 - protein, 54 aa, Homo sapiens
VTAGGAGPGAQRGGLWRSEGRRCFVAWTLVSALEQAGAWSAAGPPWSPRWARAS

SEQ ID NO: 73875 - protein, 33 aa, Homo sapiens
MRQLPAGLGSLVCLGCEVGRLATVFFSAQDAAG

SEQ ID NO: 73876 - protein, 123 aa, Homo sapiens
MGQRGAVGPPAALGVEGGAAPAPLTLACPSSRYFLDSTSETSLMPKTWISWAEIRSHTSSLSMSHPSLCCRISPTFASRSLIPLRYPSKSTSKNVSTSSTAAALMGGTALCTALQASLAAPRL

SEQ ID NO: 73877 - protein, 24 aa, Homo sapiens
MLWLPEVLLAFLEVRSREKVNWDN

SEQ ID NO: 73878 - protein, 154 aa, Homo sapiens [sequence omitted]

SEQ ID NO: 73879 - protein, 55 aa, Homo sapiens
MSQELPAAGHTTAFICALGPGLLLSLPSIGAQHPLPAHPSDSNSSPAPRPCVHFS

SEQ ID NO: 73880 - protein, 29 aa, Homo sapiens
LVRDAVSCVIPVIALQALSPSTWSLCPGR

SEQ ID NO: 73881 - protein, 53 aa, Homo sapiens
LGPALLLAPRSLPGHRLTRCLLLGETSFLPATAAASATGHRPCPGSPLAQTPT

SEQ ID NO: 73882 - protein, 54 aa, Homo sapiens
MAPESGGSVASLSLSVADAMVSCLSSWSGLDQCLPGRQVRSWEVPAVLHAELPL

SEQ ID NO: 73883 - protein, 32 aa, Homo sapiens
LPSFVVSQRCAGLLLAALRIQGVGCQVQDLQL

SEQ ID NO: 73884 - protein, 32 aa, Homo sapiens
MIVFLLQVLLMFKIACQLLSHEFSNKKMKSLC

SEQ ID NO: 73885 - protein, 73 aa, Homo sapiens [sequence omitted]

SEQ ID NO: 73886 - protein, 15 aa, Homo sapiens
ISRALAELHLLAFLA

SEQ ID NO: 73887 - protein, 52 aa, Homo sapiens
RRSATAATIYRSSDSSRSDVPTVPATGRLWCTAAAGSTSAASTVWYSVFSKL

SEQ ID NO: 73888 - protein, 21 aa, Homo sapiens
VLPFLFSAARKFSLLYMCLCA

SEQ ID NO: 73889 - protein, 36 aa, Homo sapiens
IPCFCCCCWLLLFLLLLFSMSVVVRRKHQLQRVQSS

SEQ ID NO: 73890 - protein, 129 aa, Homo sapiens
RMSEHRNEALGNYLEMRLKSSFLRGLGSWKSNPLRLGGWTILLTLTMGQGEPGGPQGDPWVPHELLLPSLCDSSHASSWGSGSITCAWRGGDSSSHPLVSGHILSNSPVAAVMCSSMGTHLSPFKGTLL

SEQ ID NO: 73891 - protein, 31 aa, Homo sapiens
IVISRLALARAAAAAAAAAAAGAARKPVAVT

SEQ ID NO: 73892 - protein, 114 aa, Homo sapiens
VASCKESLRGPKSAALLLAFASSSSRFPTVKSQRHLQRPPGPTETDPQRLARSCLLHREPPSTGEGLAGGVGRWRRRHGEVPEGRPGRCRSYVTLPLLHGPVSVRRWETRRPNP

SEQ ID NO: 73893 - protein, 25 aa, Homo sapiens
MPGPVHIALLASLNPHSFSLGSLWV

SEQ ID NO: 73894 - protein, 56 aa, Homo sapiens
MWVQPWEHCGSASQEPWRSRSLKTQWWHWWAPMPPCAAPSPLSLASAWHSSTSSGS

SEQ ID NO: 73895 - protein, 35 aa, Homo sapiens
MHARKIGLDLITALSPLVSLCQIFSAPFHTGIFFS

SEQ ID NO: 73896 - protein, 24 aa, Homo sapiens
LWVLLPLPLTTAPTALPAPVTVKM

SEQ ID NO: 73897 - protein, 12 aa, Homo sapiens
MFYEMHVWLLIF

SEQ ID NO: 73898 - protein, 29 aa, Homo sapiens
ILFLSPQLLLTRRPPAASATPPGRFHRIS

SEQ ID NO: 73899 - protein, 16 aa, Homo sapiens
IFTKFFIFFVNCWGWT

SEQ ID NO: 73900 - protein, 237 aa, Homo sapiens
KNIFQLVGLDLFVFPYRVVATAPGCGVIECIPDCTSRDQLGRQTDFGMYDYFTRQYGDESTLAFQQARYNFIRSMAAYSLLLFLLQIKDRHNGNIMLDKKGHIIHIDFGFMFESSPGGNLGWEPDIKLTDEMVMIMGGKMEATPFKWFMEMCVQATWLCGEPGPYMDVVVSLVTIMLDTGLPCFRGQTIKLLKHRFSPNMTEREAANFIMKVIQSCFLSNRSRTYNMIQYYQNDIPY

SEQ ID NO: 73901 - protein, 57 aa, Homo sapiens
VGSNPMAASRGGCLQLLQPQWACVTCALLVLLSVGSLCSSAQLDPLPYCKDRGLSVS

SEQ ID NO: 73902 - protein, 63 aa, Homo sapiens
IFIFILVFLLLFSSFVFFFSLETGSSYVGQAGLESPGSSDPPASASGKVGLQARIAAPGQSLF

SEQ ID NO: 73903 - protein, 73 aa, Homo sapiens
TVRFLPSAAGRVGSPWFRPAPPSWSPFSRWAGLSGGDCLPGLAIGLLMMFDPAAGIAGNVISKLGSASVSSLV

SEQ ID NO: 73904 - protein, 46 aa, Homo sapiens
LPPALTLPLVCCSSRSAGPETLQQGCGLLVHRRHHLHIALWIPPIL

SEQ ID NO: 73905 - protein, 50 aa, Homo sapiens
LVRNFLFLPSLRLQCLMGLPVGGSVFAVPGRSGEPWEEVLRRPSLGSPQD

SEQ ID NO: 73906 - protein, 70 aa, Homo sapiens
LVIWSFFFFNFKILRQALTMLPRWSQTPGFQRCSCLSLPKGWDYRCEPLCPAHLYISFGEYLGSFEGSCI

SEQ ID NO: 73907 - protein, 30 aa, Homo sapiens
LAGSLAAAPQSAAAAAACGPGGWEKRSVGN

SEQ ID NO: 73908 - protein, 34 aa, Homo sapiens
MAMLMLSMVSLLQTFIYTLREKNVSAVTGSCFGG

SEQ ID NO: 73909 - protein, 59 aa, Homo sapiens
MAFMLLILNTASVGKEAFVFDLSIRGSSHRNARGKRTLPYSHLMLQTMFMVIHTFQNEP

SEQ ID NO: 73910 - protein, 46 aa, Homo sapiens
LGLTCLFLLLATSQSQDGCCDSGSCPNSRQQEGHGAAPASSCLPIP

SEQ ID NO: 73911 - protein, 27 aa, Homo sapiens
LLLFLLLLFSMSVVVRRKHQLQRVQSS

SEQ ID NO: 73912 - protein, 113 aa, Homo sapiens
MRPHLGQKPLAPLSLMGPEEAVVRAARNATSWRMRSCSKSSLNFVRCRQQTTLRWSHSSITGSNVPTLCFWPRRSSATSSLGSCLGPGAGQPSSMSTSMSSALFSRPTQPKRS

SEQ ID NO: 73913 - protein, 28 aa, Homo sapiens
RTIFLGMLVLEASGPRSVFGLIDPRFSG

SEQ ID NO: 73914 - protein, 114 aa, Homo sapiens
ILSSRLGTPGSLTAAAAASASRTIGSLGNNSGGRPQRGSGSPCLRGSGDSSRPPPPGRTASVVPACNASAGEWLLLCPSWGPSQDQSANSIPPAGRSRGAGTKPAASSRADPGT

SEQ ID NO: 73915 - protein, 83 aa, Homo sapiens
RTKSHGHADRVPRETVSVGMCAWLCTWVCSARESTWRLLGAMFGEGGVPAAWRASVPVAPCPGTAACTSRAAFGGWGFCHFRV

SEQ ID NO: 73916 - protein, 65 aa, Homo sapiens
LEPARRSGRPRLCPLLLLTARARGTSSRGCFGCRGRWSLWILHGTSWLWPSPARPCFPFLTSRTI

SEQ ID NO: 73917 - protein, 48 aa, Homo sapiens
IWWVYQGFLLLLLPQFLLLPPCKKDLLPPTMILSPPQPRGTISGGFFK

SEQ ID NO: 73918 - protein, 45 aa, Homo sapiens
TAPERLRRRRRRRRRLGAGGPGCSAGAAASSRSPFPAAQGFIGSH

SEQ ID NO: 73919 - protein, 29 aa, Homo sapiens
KSKAKSQGSPWLMYLGLLWSTLPSCHPVE

SEQ ID NO: 73920 - protein, 54 aa, Homo sapiens
RTKSMTSRWRSRICGWRTMGVTAVRSLTGWRMKAVWWSWSCGDGAVCPHISPTC

SEQ ID NO: 73921 - protein, 178 aa, Homo sapiens
RRLVGLAGLSDAARVAVCELRVDCVVTGVPLSRPVAGERGCVVRGGGGTNAVRAGRPPQGPWPPARASTSRTPRSTCGTSSSWTGPRAAPVQRAHGHPVPTMGTSMDFWSQTRSAQVIVPQQTRLVFGPCHPLTCKRSRSSVSQEMIAPPALGFWPRRWRLWLAVTLAFQARPGEATR

SEQ ID NO: 73922 - protein, 34 aa, Homo sapiens
MRLTACGSWSCVRSVRSLSPRKPWRSTASLSTSR

SEQ ID NO: 73923 - protein, 53 aa, Homo sapiens
KRSPRWSLTMAPACAKLVLLGTTLPEPCFLPSSGAPDTRTPTWATRPRASVAS

SEQ ID NO: 73924 - protein, 30 aa, Homo sapiens
LRRLDLLVLTHLTSTIQQAAMTPQLSLPLT

SEQ ID NO: 73925 - protein, 40 aa, Homo sapiens
RWGYGPWHYSTPGRKIWAACCLVHLCLFAEAESLAAAGSD

SEQ ID NO: 73926 - protein, 144 aa, Homo sapiens
VAPLAGRSPWGSVVQATLRLLQPSPRGLCSGAVVFRLGLRPRLGAACSGSIFPFLPPLATSPYGVRWQRRFLGRPGFNLSGGPPGTLLPLRRRGERRRDRRPPPDLPGEGPAGVRLGTRKLGGVRGLPRGPCGGGVRTADRFIA

SEQ ID NO: 73927 - protein, 43 aa, Homo sapiens
MKRCHLAAMAAVVSATPGQGPVECSTMGSTGYRAETALCQLCC

SEQ ID NO: 73928 - protein, 81 aa, Homo sapiens
LKLSFSTLLILCFCWSAYHLMASKTNAKFLSDYAALPILKTLAESLAPFKGLIINCLSGRPPMRLHLCGYTLLVWTLSKFR

SEQ ID NO: 73929 - protein, 46 aa, Homo sapiens
MKESSVFLSLFRTSRGFVFCETVFLYSCSNDRVTCTVVLLPECTDV

SEQ ID NO: 73930 - protein, 140 aa, Homo sapiens
LLSPASLLRLSCSSAAFVSGPRPSSPPAQRSPRARQEAAFRWPAAAATSAQFLPLASLPNGRSSPAGRPGCDRERPILSRSRSERPAATPRDHTPAALGPARLPSPPAVAPRPLHDDATPLLQAADPTGPRPRRKMATAA

SEQ ID NO: 73931 - protein, 40 aa, Homo sapiens
MRHILLPPCTSASRTSLGRAWPKASYQQHHQGTLELSCQN

SEQ ID NO: 73932 - protein, 40 aa, Homo sapiens
LSQAWVCVSFLFLLSLLIALTNLLGSLLELTWCWIFSNCI

SEQ ID NO: 73933 - protein, 32 aa, Homo sapiens
LGLSLPLPCLGLTLPGVQIRPGLPVQRVVVND

SEQ ID NO: 73934 - protein, 52 aa, Homo sapiens
LSLCSKTVNSLLSLLHLFHSFSHCVTALQRPGSWRGTLGVASLLFAYTEKAM

SEQ ID NO: 73935 - protein, 16 aa, Homo sapiens
LGLAEVEDLLLSRPRN

SEQ ID NO: 73936 - protein, 29 aa, Homo sapiens
MAMRWARACRVGLLGGSGARPGGYPPLPA

SEQ ID NO: 73937 - protein, 134 aa, Homo sapiens [sequence omitted]

SEQ ID NO: 73938 - protein, 35 aa, Homo sapiens
LGSAHHAPLMFAVWRALSLAVETSVTLGRVYFFDG

SEQ ID NO: 73939 - protein, 64 aa, Homo sapiens
LRQKTSAAFSMGCSTFFIAHPGNSQASSICILAAACTLGDSGATVWDRAHWQGTGGCWQASGHG

SEQ ID NO: 73940 - protein, 29 aa, Homo sapiens
MLLLAACAFVSSSFKRPHRQTAFHPQHRH

SEQ ID NO: 73941 - protein, 28 aa, Homo sapiens
MGGVSACPCLMSLVEQVPPGGQASDLHT

SEQ ID NO: 73942 - protein, 24 aa, Homo sapiens
MQHRRLPFSVVLLPQFVESGVSMQ

SEQ ID NO: 73943 - protein, 107 aa, Homo sapiens
LSGQPLESLGAALLLTSHTFASSLCSQLEGHECPWAVVSGRGPDTATLLPGGRGADACLILPEDGATGGCGIRAPCPALCLPAQAGHSAGRPPSAAHRGQPCGQEPL

SEQ ID NO: 73944 - protein, 56 aa, Homo sapiens
LSPSLPSPVFVLSSAGARAPTAALGGFSCSAMVAQRFCYSRAPASSQVYPELQMGV

SEQ ID NO: 73945 - protein, 69 aa, Homo sapiens
VCVCVCVCVCVCVICMCMMCVRRTASRLLSVNGKENVFKILKSKLEDGEKKIYSIQSLVWTTLERLLFF

SEQ ID NO: 73946 - protein, 57 aa, Homo sapiens
LGLLLLALLLPVQVSSFVPLTSMPEATAAETTKPSNSALQPTAGLLVVLLALLHLYH

SEQ ID NO: 73947 - protein, 20 aa, Homo sapiens
VQLPAVYGNSEHRAGPCQCC

SEQ ID NO: 73948 - protein, 52 aa, Homo sapiens
MPASAQGRAWPALLRGPLWNALNKARARTPGACAALVANISSAGPQDKWYDQ

SEQ ID NO: 73949 - protein, 24 aa, Homo sapiens
MLAVAGAVIFISSFLKHRSRNGSK

SEQ ID NO: 73950 - protein, 14 aa, Homo sapiens
LIYTLRIVDFFFLF

SEQ ID NO: 73951 - protein, 12 aa, Homo sapiens
IIVVVLNLALRA

SEQ ID NO: 73952 - protein, 27 aa, Homo sapiens
KKEEAGVAAAAAVAAGAGVGAAVRAGQ

SEQ ID NO: 73953 - protein, 33 aa, Homo sapiens
IFFLSSSFLTTLIVGRSKCSFILVLVQVQELKT

SEQ ID NO: 73954 - protein, 33 aa, Homo sapiens
MNKARNSCLFSVLPLLLSLTTSVNITSQLLLQL

SEQ ID NO: 73955 - protein, 24 aa, Homo sapiens
LSQKIFLSLLLQSQLRLGTSTAEW

SEQ ID NO: 73956 - protein, 71 aa, Homo sapiens
LDRLLHIRPRNGPLEKGFFKPAALSSVLASGIAFPGNLASDIAHHPALFTVPGSSWRNDISENADSYVHVI

SEQ ID NO: 73957 - protein, 41 aa, Homo sapiens
IFLWLLTGSYYKALCMDTIFLYYTRKECTYHTQGEKCSFGC

SEQ ID NO: 73958 - protein, 29 aa, Homo sapiens
MWLPQRQVFSCVVASPSHSTGCPDAINIC

SEQ ID NO: 73959 - protein, 16 aa, Homo sapiens
VSFISVTLMCLVYSRQ

SEQ ID NO: 73960 - protein, 26 aa, Homo sapiens
IVYLPLLLLSYNAWKQEMGSAAANRT

SEQ ID NO: 73961 - protein, 19 aa, Homo sapiens
LWGSLCPLLFHCFQLVVVG

SEQ ID NO: 73962 - protein, 24 aa, Homo sapiens
MLWRLCCFALSTAYSSGPHCFYEL

SEQ ID NO: 73963 - protein, 14 aa, Homo sapiens
IFSLFISVVTAFAV

SEQ ID NO: 73964 - protein, 36 aa, Homo sapiens
MCPISLFSVLPPYPSPSSAWKRTMAWTSASPDSCSP

SEQ ID NO: 73965 - protein, 59 aa, Homo sapiens
RMLRCPPKWIASYLVPACCRLLHLVPLGTHCAANSSRQIHWEAVAHEGISETFFCDLAV

SEQ ID NO: 73966 - protein, 54 aa, Homo sapiens
MKSIVGLGVIWIRGTSAEAVVMRNTLLFKMAIQIILNTVYLFYLDYQQRLKHEM

SEQ ID NO: 73967 - protein, 14 aa, Homo sapiens
LIFRSFSVLLSVVV

SEQ ID NO: 73968 - protein, 104 aa, Homo sapiens
VKGVGFFLCVCVCVSGEIFHYECFTKVNFFLFASFVFGSFFFLPNFGFISRRIWLWGKRKKSRITRSTTTNNNKNHQDIFLQISDGFKFMKQLSPFAISIWISE

SEQ ID NO: 73969 - protein, 62 aa, Homo sapiens
VRAVGCALSAGLGPGHAPPSPAPQAGARPRIRSSRASLGRPARNHPLRCLLFRDGEVGKRLL

SEQ ID NO: 73970 - protein, 17 aa, Homo sapiens
MGPCALLTWAVLVFKPA

SEQ ID NO: 73971 - protein, 53 aa, Homo sapiens
INSANNRRRFMALAAAPPSFGLPRVFLTINQQMYRSALKMSSVSSERLLRQLH

SEQ ID NO: 73972 - protein, 86 aa, Homo sapiens
TRPHPAARAALSSAASALGAFSQKQSRRARWFLSARKSPELTTGRSATARGPKPQKDDGRVMKLSPGLLGRRECAGAAWERREECR

SEQ ID NO: 73973 - protein, 42 aa, Homo sapiens
LFATFISVDFFFLVCVVVVFKCGGQKEIPSQAQSNPSPKRLF

SEQ ID NO: 73974 - protein, 17 aa, Homo sapiens
MKLVFILTADTLLSIAD

SEQ ID NO: 73975 - protein, 29 aa, Homo sapiens
LRFLVFIVVLSSHETPLEDMCLSGASALH

SEQ ID NO: 73976 - protein, 34 aa, Homo sapiens
LLGLPAAGASTLCVCLAAAVACSDWLLGPSRSEH

SEQ ID NO: 73977 - protein, 10 aa, Homo sapiens
LAALTFLLAG

SEQ ID NO: 73978 - protein, 29 aa, Homo sapiens
TAGAGALLLRGQAAAGAAAAAAARSSHAE

SEQ ID NO: 73979 - protein, 66 aa, Homo sapiens
ILAFSRRSSPVVGSLAWLSPAGSNGQAPVVSGLSASSCVAPSSWPTCVETGCSRWWDTLPWIQTLI

SEQ ID NO: 73980 - protein, 36 aa, Homo sapiens
MLTIFFLPLATSLPTCFLSTLVQLFLQRPRSSELHI

SEQ ID NO: 73981 - protein, 56 aa, Homo sapiens
MPVKARALVFLFLWSAAEMTATAPSQYIYMSFLWTSAPFKIKAGTQMWGWKWSSPF

SEQ ID NO: 73982 - protein, 32 aa, Homo sapiens
TTAAAAAAAATAFCAGGGGGRSGEHGPRGAGR

SEQ ID NO: 73983 - protein, 12 aa, Homo sapiens
VALTGLALGCSL

SEQ ID NO: 73984 - protein, 66 aa, Homo sapiens
LSRTPRPAPRRHPRRSVLFPLCFSPVLGQSCPRSRVGLRVCAGAAGAISPLGGRWSPGARGRDHGG

SEQ ID NO: 73985 - protein, 42 aa, Homo sapiens
VPTLACLGLSFHICTMGVTIPALLAARSGCESSGVDAAWGKP

SEQ ID NO: 73986 - protein, 34 aa, Homo sapiens
MSHHGRPCITPLCSLPHAAQPELHSQVSGASLLI

SEQ ID NO: 73987 - protein, 18 aa, Homo sapiens
LFLFLAAAAGLVVLHLRG

SEQ ID NO: 73988 - protein, 37 aa, Homo sapiens
LSACVCCRVLSLHWCASGQAALLGPGPCLPTPPPSWA

SEQ ID NO: 73989 - protein, 31 aa, Homo sapiens
MRAGIFVCCVLCVPPVPSQCLADGKCSTHIG

SEQ ID NO: 73990 - protein, 13 aa, Homo sapiens
MMGIPPVLLLLFS

SEQ ID NO: 73991 - protein, 28 aa, Homo sapiens
MKPPSLFLPLTALEPRSQAGHGSGVLQG

SEQ ID NO: 73992 - protein, 29 aa, Homo sapiens
LGSLERGLLKITAAAFGLGSVLSACARTG

SEQ ID NO: 73993 - protein, 95 aa, Homo sapiens
MFPRHHRRKLRRLTALTSAVNSAHLASGATPASAVTSTTVATGWRSLVGTTNTSMSAVAKISSTSTTCSGLPPSSTLLACSWASSLPLSLEALRT

SEQ ID NO: 73994 - protein, 45 aa, Homo sapiens
MRKRKRKKRRRRSHPQNLLSWSTISPTNSKITSSRSQSSVMSVPG

SEQ ID NO: 73995 - protein, 72 aa, Homo sapiens
MAIKGLSFLLICLDKQQSPFGCLLVRIFLKVSCTFPCFDEWNGRAGFNCLMATVLGKCQNLHVSHPRATGRV

SEQ ID NO: 73996 - protein, 16 aa, Homo sapiens
MLNFLILTFLSFSRLF

SEQ ID NO: 73997 - protein, 38 aa, Homo sapiens
TSACVRAGFVAAAARAGAFAGLVAPAHFYSSPVLLFRI

SEQ ID NO: 73998 - protein, 88 aa, Homo sapiens
LCLGSRSGRILALLAFLFQKTRNRPAGLRDLKRDCYSLFSGSGRGSLSRSVERGEGRIPCDRLWLSWARAWRRYVESLSRRHFWLPTC

SEQ ID NO: 73999 - protein, 49 aa, Homo sapiens [sequence omitted]

SEQ ID NO: 74000 - protein, 81 aa, Homo sapiens
MWPLQHISVASVSVVSFLCLAPHGFKSTRAGVETAHLALILSDWWFWPVSRYLSIGKAALRCGGHPDSHRLHSRNGSMRLY

SEQ ID NO: 74001 - protein, 36 aa, Homo sapiens
MKTSMMSHLHLMTVSHWPATCSRYSCAGCGTPHLCS

SEQ ID NO: 74002 - protein, 32 aa, Homo sapiens
MSSARLSRSTSTRALSLVSWSTCRRSSRISSS

SEQ ID NO: 74003 - protein, 64 aa, Homo sapiens
MTSLSIPSQNCSKRLLSSSLCSSSSRILQSSSTSSSFSSCSSTPSSSRLAWSTSYSISSKGPSS

SEQ ID NO: 74004 - protein, 68 aa, Homo sapiens
MLRVLGGGCGLGRGLGSLPVVSDQRLSAGRASRDREETATKRGGSEQQDETAASPASVPWPGSSRNKS

SEQ ID NO: 74005 - protein, 47 aa, Homo sapiens
MPRAAAPSVAAAAAGAQGAAAAVRWGRQREAAGRAAGAGAGGAARPA

SEQ ID NO: 74006 - protein, 40 aa, Homo sapiens
MPSRMSNLSATRQVFLWSLGQATCLFYCKSCHEILRCEIG

SEQ ID NO: 74007 - protein, 34 aa, Homo sapiens
MPPAARWPGPQCPKRVFMLFPTALMVPSDRLALL

SEQ ID NO: 74008 - protein, 67 aa, Homo sapiens
MSAAAAAAAAGPGRGQALGGPGPELEPEPELEAGKTGAAGGGHGDEPGLADAAPSQSEGRGPAEGTR

SEQ ID NO: 74009 - protein, 82 aa, Homo sapiens
MSSGGRMQRMGRLRPWLCVPLRVGAGLGPNSTAAGFSLISEPRRWQSGRPGQVNPRAAGAQAPTPAQRGRKGPPPAQRAQRP

SEQ ID NO: 74010 - protein, 34 aa, Homo sapiens
MRARRAPCLQSLGTGAPAPPLGSPPKRDLRSVDP

SEQ ID NO: 74011 - protein, 78 aa, Homo sapiens
MSLLSLAVASVCEEAGAGEWEPMTPRLTAMSTCAHSFRPQTSRDRSKLHHSSPPGLALPRRLSGSCCPVRAPAPERPH

SEQ ID NO: 74012 - protein, 68 aa, Homo sapiens
MIQPLQRPPAATPAACAGAAAVAAPGTKSGGARGRPPGRASCSPSPAVKYVPRQVLRRCRAGRSLLTS

SEQ ID NO: 74013 - protein, 43 aa, Homo sapiens
MPSVSVVIQRSQRKCCLGMSMLMIIRSMLSTELPDNICYAECL

SEQ ID NO: 74014 - protein, 97 aa, Homo sapiens
MQKSPSSASLTLGAVDQSCSYSAILAPYSHYLLELWLRHYNRALSPLSKSWEMVIVNASPILEAPGCRGPQLDPSHPWSLTLDLSQKAEKRSSLESL

SEQ ID NO: 74015 - protein, 27 aa, Homo sapiens
LEGVVLLSQLSCLSAMFSGRVWLGLPP

SEQ ID NO: 74016 - protein, 34 aa, Homo sapiens
MSHLVPMRMKAEVCAFFFFSFLVVCTSLGMEGNK

SEQ ID NO: 74017 - protein, 23 aa, Homo sapiens
MRAWLTATSASQLQVILLPQPPE

SEQ ID NO: 74018 - protein, 56 aa, Homo sapiens
KCPHLLLSSSLTPSHPLASDPFSTGDLPLLRSSSSSFTSPPSSSLALIMLMLEENE

SEQ ID NO: 74019 - protein, 32 aa, Homo sapiens
LDLLASVLRLVSSSAGALATRPARSPQRSGRV

SEQ ID NO: 74020 - protein, 84 aa, Homo sapiens
VLHTWVSLPRAVCSGSFGPVGGCGAAGVACAVRPGILPVMEAAAAAAAGSRCAPSTAAREVGKFAARRPKARGAAPLCRELSPI

SEQ ID NO: 74021 - protein, 37 aa, Homo sapiens
MVAPRAAPPAGAFLSGQAVFHGRELLAELPLFAMDFG

SEQ ID NO: 74022 - protein, 45 aa, Homo sapiens
LTPGELSLPPRCRPIFRGRKMPSNAPTNFLRLAKSSLLWMFFMML

SEQ ID NO: 74023 - protein, 81 aa, Homo sapiens
RKYQSLCKQSLVYSCLHQSTVRFMKKNKLRTTLYVHLQMPQLMLVGCLSAFCDNEHMDFCLLNSVDPFSQLPGAWIFTSNC

SEQ ID NO: 74024 - protein, 51 aa, Homo sapiens
LDSGNPLSEDHRGVSLTTPNRIRPDLKLPSPLWLPSALFISSLNLLGISVS

SEQ ID NO: 74025 - protein, 44 aa, Homo sapiens
LRCDLLLGACLLVRSEAACVGPSPTRRQVASVSWCCPRLHAAVP

SEQ ID NO: 74026 - protein, 39 aa, Homo sapiens
VEREQPGRKLRRLDLLVLTHLTSTIQQAAMTPQLSLPLT

SEQ ID NO: 74027 - protein, 46 aa, Homo sapiens
MTSASCTQPASGVLSCGWAQPPSSTMVRVRQVDGQDGIEPGRAGGV

SEQ ID NO: 74028 - protein, 80 aa, Homo sapiens
MKGAFLARVSLTLWIFWTIPGISCRAALPLKSSLSRLDSQYLYSHYSLLVSRLILYCQSSSTPFPLEFEFIFFQTLHKPK

SEQ ID NO: 74029 - protein, 27 aa, Homo sapiens
MTGSTLTSTSCGFVFVATWSGPRPGLR

SEQ ID NO: 74030 - protein, 30 aa, Homo sapiens
VRTQLREGFVLSSVLWCRASSSPAQPRRLN

SEQ ID NO: 74031 - protein, 191 aa, Homo sapiens
LFFLFVCFPPFAPGSCAASSCKAVCRGRARPSPLAATPPRGRAGPEVARGAGGASPSERRERRQRSRTHSAAGRHQLGRARTRTRRPARRGPARARVGGGGRRGAAASGGHAGALLRVQPQLPGSGALPRRRAELLPRGGRGGRGRLHRHAGPHERVLAPCARRAVPGRHGPRLRALHAAAAAQGHGEAAL

SEQ ID NO: 74032 - protein, 96 aa, Homo sapiens
MPTIATLAPTTSTAAPTTASQAPPTSQLSAGRITEKVSEDSVPRLAGTRRAGRLAGIDTNTGENLVSEQKIQDQEDHEKRGDAPGAQSQLQRPNGV

SEQ ID NO: 74033 - protein, 64 aa, Homo sapiens
LFTGEFMTPLTLLLSQTLGFPKLSIASCKQMTWEQMLWQNDGLLARAEACPVKTGKNICLSEIW

SEQ ID NO: 74034 - protein, 111 aa, Homo sapiens
LQPRRLGRASRLRAPGGGLGAPAAAGGAVARAAAPVLRRPREAAGQALWAGLLLRLLRDRLPPGSAGARRPRSAALRPPPRAPARGWREPRRARGRAGPWSWPPDGPRPPP

SEQ ID NO: 74035 - protein, 29 aa, Homo sapiens
LNERGQRMLPMLPLFIVSPGGSHVLEEGW

SEQ ID NO: 74036 - protein, 176 aa, Homo sapiens
VPSLLLAGPGAAGAGAAPLPPAFPPPSPPPPPPPSPNHPRSHNRFRLAGVPRKERQGRKRQQGKPRGGEGEREGGAQRRGPAPQLHVAAAAAGLWGQRAAAPGAARSGTDCLILRQGPGPQLARINSRPAGPELQGRAAAAIPTTPPARPHGALSRVLSTGGPAEAGTQDLQRNAS

SEQ ID NO: 74037 - protein, 42 aa, Homo sapiens
LQGGAGTEPVPGACIGLEVGLGLGAGASLPLQLTSVVLPLGG

SEQ ID NO: 74038 - protein, 29 aa, Homo sapiens
LLSAWAAALLGSGGAGGVGRGCPRPAPPE

SEQ ID NO: 74039 - protein, 47 aa, Homo sapiens
VVPFLQKRHAAVALAPSAGAGGLAFWTLASPHCNACYTQTVVGSCQA

SEQ ID NO: 74040 - protein, 35 aa, Homo sapiens
MGTRSRAAVAAVAAVAVAAAGKQLTGRRRRRRWRR

SEQ ID NO: 74041 - protein, 58 aa, Homo sapiens
VPAWCLLACGLPAHVHLAAVGTSAGPGFQAPAQLPVSGLGPCPFHPVLRKSKCLVLNV

SEQ ID NO: 74042 - protein, 73 aa, Homo sapiens
VALQRRQIARRRRRLHAAGGLLAPAGGRAAGRPGRLRTATIAIGAEPARLPSAAACLGTNWDPGFEATSRARN

SEQ ID NO: 74043 - protein, 82 aa, Homo sapiens
MWLSSSSRMTQKSSSLTSGKLAMAALEPYTLPGMSGIVRWWPSRRCPTVGSSPMRNGKTSSRRCGSYRSSGIPTPFSTGAVT

SEQ ID NO: 74044 - protein, 100 aa, Homo sapiens
LQRRRWCRRAASHHQQLLDKGRRVAVFVPALFRLPVIPGLPAPLSDEHFQAPLCPFSVLMLSRPRQPSGALWEMPARNEQALLLGSLLSPSWTYSPPDTL

SEQ ID NO: 74045 - protein, 78 aa, Homo sapiens
LLLKSPGGRRRRRGFLAAASAPPPPSPSPRFLSAPRAPATRPQPALSSAPRSRRARPSPRHGGPAGPRAPLHRAAHPA

SEQ ID NO: 74046 - protein, 148 aa, Homo sapiens
LHKLNKKLVWALHPLWQANSCIKLLGEMGGQGKDVKPKYSRNPPPVSLPSPILLPVRNATRTLTLFLALAASFPKSQCFPFLNFPSIKLKTDVLINQAVLEGYCIGRQGAVVDLTFNPSFQRYFLNNSKREVLGIKVTVHLILFFVLV

SEQ ID NO: 74047 - protein, 100 aa, Homo sapiens
LPKSVRLLLRLRKLDARTLVCLRGLLPSALVPRGVWAAYAFRKHWDAGAQASQTGGSVYSHQPGGNKPAWEDRRSALAVPQERGASKAHCPLGQGVSRRS

SEQ ID NO: 74048 - protein, 61 aa, Homo sapiens
LDLLRLPSCDAVLLFVLGGSASAEMWAAGQDGHSGSAQQRSPDSDWGSKQGLDRPGEPVGQ

SEQ ID NO: 74049 - protein, 70 aa, Homo sapiens
LLKVSPPTCIALQSVASALANSASSPADWASAEMWAAGQDGHSGSAQQRSPDSDWGSKQGLDRPGEPVGQ

SEQ ID NO: 74050 - protein, 63 aa, Homo sapiens
MEQIRTTPWTLISSLAPELAFEASAEMWAAGQDGHSGSAQQRSPDSDWGSKQGLDRPGEPVGQ

SEQ ID NO: 74051 - protein, 95 aa, Homo sapiens
MTWGLQHPSSKPFPKKVKRSQDDWHLLLLLLFFLFPCPAPSCACVSDNTGASTGVENPAAQLSSAHRSLGNGLSLCNKKIFFFFLNLHYIFFDCL

SEQ ID NO: 74052 - protein, 62 aa, Homo sapiens
MRRGFHLGLSSGMTSSVHLLVFKDHLLSMLSCCQGACCPSTPHEGTRSTVSWIPPTYKAATH

SEQ ID NO: 74053 - protein, 33 aa, Homo sapiens
LTGPRLLDAASPLLLPAGRAPVAAAKWGTKALC

SEQ ID NO: 74054 - protein, 67 aa, Homo sapiens
MTKVPSCFLLPVLLLGRKRGLMRLHSGAHITRCICRHRAGCLQPGEGQREGVYECECVCMEVGALGV

SEQ ID NO: 74055 - protein, 123 aa, Homo sapiens
MQAQFCCSAVCSAFLHILASPSGAKMAAAFQASHPDSDPEKLPIPTWVSLCRNEKPHPAAETSPSSVFSGLIHQRRPPLNQSLAKRMGPPGRLDQTGPALWGWGEAQMKAAGQDGLLDLCYQQ

SEQ ID NO: 74056 - protein, 158 aa, Homo sapiens
MGDHGGRREPAHPDCTLLWSGPASHLQPGCERPGPGHWGDPLTASPRGAPAPADARPLLAPSAALSATEQRGGQHACPGPVCQPSAPGRVHTARCGAGGPPRTHRCGQRPHGRAPAASTAASPAVRHSPQWCPCHQWAPHNRLGPRAADAADHWRGEV

SEQ ID NO: 74057 - protein, 139 aa, Homo sapiens
VYAALRSCRRRHRSSLLSHVLRPGRQLRPRLPYALLFLLWRRGLQLIPSAHALTSPPAPAQPHGTLLHGGPPSSPPTCAPPVEPVLRPPPPPSPPPPPRLRWLWACLQLCRLLGLQGAWRRCCFLRLETQLQLPRLSGL

SEQ ID NO: 74058 - protein, 37 aa, Homo sapiens
LARRRRGLAIASGSCELCFGAGALPRRTGGRMNPAYL

SEQ ID NO: 74059 - protein, 43 aa, Homo sapiens
MALRFSRTTALSSSLLIIVTKSCNKSSLNLLLKKSRRSIYGRI

SEQ ID NO: 74060 - protein, 129 aa, Homo sapiens
LRSIPFMGQRGAVGPPAALGVEGGAAPAPLTLACPSSRYFLDSTSETSLMPKTWISWAEIRSHTSSLSMSHPSLCCRISPTFASRSLIPLRYPSKSTSKNVSTSSTAAALMGGTALCTALQASLAAPRL

SEQ ID NO: 74061 - protein, 57 aa, Homo sapiens
LRAEHGNFSSNQSAPPHISGMLHGDMLLSLPSAPATWIVSSPSSSFSAALFSTASGN

SEQ ID NO: 74062 - protein, 145 aa, Homo sapiens
LPLSLPTLGVLPKALSMRAQGLSCGYPARPLQPFLEHLAGSGITKRTAPGCAPLRWVPQIRGCPLTRLAQRGADTRTRENLFYSRFPGLQLPAAETVRPLCLSALPAAPLSRFLSRLTPPTRSSLAPLLLPLLLLLFLLLHHRPR

SEQ ID NO: 74063 - protein, 43 aa, Homo sapiens
VAETSGRSRSLGRSGPRQRDMVLLCCQSGLKLLALSDSLTSDS

SEQ ID NO: 74064 - protein, 51 aa, Homo sapiens
LSLPVMATFGCCLHVWGHRAPSPSPEKLSQAFWLSSTGALQTPGPFQSKSN

SEQ ID NO: 74065 - protein, 33 aa, Homo sapiens
LVFGAGLAPSLGSGSSLSTRASPPSLLGAALRG

SEQ ID NO: 74066 - protein, 36 aa, Homo sapiens
LSLPAAMCLLHTCTHALAHIHTCVQACADTQGWSCC

SEQ ID NO: 74067 - protein, 83 aa, Homo sapiens
LTGQSLPTPLACLTCLIYSPTALQAALVHGLSLHQQVPSAPDKPLLVSPSPAKHPPVPPPVGLASGLWTDSCPIPETPRDRAL

SEQ ID NO: 74068 - protein, 93 aa, Homo sapiens
LTGQSLPTPLACLTCLIYSPTALQAALVHGLSLHQQVPSAPDKPLLVSPSPAKHPPVPPPVGLASGLWTDSCPIPETPRDRALARGPWPGWVG

SEQ ID NO: 74069 - protein, 112 aa, Homo sapiens
MPHSRNHACSPGPFAVLWASGGFPAIQAGLPPLRRLVPRVGGGLSRMPPGVRAWWAQFSLPLSLGEEEGLGGLRSWALGLSCPPLLLCEAADPSLPTEGLGLEASSRLPGES

SEQ ID NO: 74070 - protein, 25 aa, Homo sapiens
LKEEKGMFCLVLFLLEATKGCWGCF

SEQ ID NO: 74071 - protein, 113 aa, Homo sapiens
LSSRLGTPGSLTAAAAASASRTIGSLGNNSGGRPQRGSGSPCLRGSGDSSRPPPPGRTASVVPACNASAGEWLLLCPSWGPSQDQSANSIPPAGRSRGAGTKPAASSRADPGT

SEQ ID NO: 74072 - protein, 103 aa, Homo sapiens
LLPRAQKWLVLSLQRNAMRVGEKMMGRLFHSFSFYNFTFRDFSVPCLLCCGTQSALAWMAENPLDPGSTYSMMARRRTKLETVLALRKQEGRRVKGTSTCTQR

SEQ ID NO: 74073 - protein, 48 aa, Homo sapiens
LKRRRRGSLWWCEWEAAALVAAAGVRREAAHSTADWSSGKGEDGDRRI

SEQ ID NO: 74074 - protein, 194 aa, Homo sapiens
MARSVWCWSTSASAGPTASQWTTRMGSCTGAMHGQTRLNGSTWRQVRTARWFCPATTWTCFQCLCLRISSTGVTGLMPTALSSAGAKTMPQTPCPCEPASASSLKTSKSSTGTGRKAPTCARWPMAGASSCACTGAVGSGPAPVPTGCWLKTEHRAASMPATCSTQSAPFSRVSTCRMSATSMRPCSPSRTLST

SEQ ID NO: 74075 - protein, 47 aa, Homo sapiens
LRGGRWPEVISVPLCFPPQSVSPSSAPFNPCRSDGESCQHVLGMGAD

SEQ ID NO: 74076 - protein, 54 aa, Homo sapiens
MRAVNTTNSKCRCRMRPRCRRLPLGLSGARPRSACMCRTPTSPPCSRRTHFGPA

SEQ ID NO: 74077 - protein, 103 aa, Homo sapiens
MQQKPHRLERNKSSFLCPGAGCGALAEPSLQSPPGPLAVEGGLGLARRAARPEHPGQKTIDVHLQMQHPVPGALRWVQNVDGVFKRISFQVDQEVNVVILFPI

SEQ ID NO: 74078 - protein, 32 aa, Homo sapiens
MLGAPRATAAAATATQPPPLRPSPVSAADARR

SEQ ID NO: 74079 - protein, 75 aa, Homo sapiens
MRQATSAPLLAPRCVPADLRASPLPRSAPSTPRFRYIPEESEIRFRCEARFRILFRFSISRNLKLRPLGLHQTAS

SEQ ID NO: 74080 - protein, 116 aa, Homo sapiens
MHCPCLLSACCMLGPSMRSAVMGTRKGLCRRHGETQRAAGAEGRAAQAAVLHHTQAREARDRVRLHAPLPGDRAAARAGGTGEGHGEAAQDSEQLHGTAEDQPGAGGQAVPHGPAL

SEQ ID NO: 74081 - protein, 31 aa, Homo sapiens
LSPRLECTVVILAHCDLCLLVQAIFPPQPPE

SEQ ID NO: 74082 - protein, 45 aa, Homo sapiens
LSCCRLLSSLQPPSLAYSAQESLEPPPPLPNQVNLTRSRGRCRKA

SEQ ID NO: 74083 - protein, 33 aa, Homo sapiens
LVRLSSCVPVALMSAMTTSSSQKNITPAILTCC

SEQ ID NO: 74084 - protein, 32 aa, Homo sapiens
LIQPILRNLRMRMMLLMKLCDVFVRWMRRMAS

SEQ ID NO: 74085 - protein, 88 aa, Homo sapiens
LSCSAMVDVLAFPLPSAMIVSFLRFSSHASCTACRTALSFIKYPVSDRVDFNWQSYSVLFTWKILCNLKVLALLTLRMTMEHLNGSCL

SEQ ID NO: 74086 - protein, 267 aa, Homo sapiens
LPLWAALPLHPQRGRAAARAVGGRLRGPACLWHARCVAPGLPAGAAAQVAPQPQLLGLPVGPPSAPGRPRVAAAARQPHVAHAAAALLLFGLVLLLLRLLLFLGLRGLHALGRPDMLRLRGGRGCGRSAVRHRGRRGPAGAGGPVRGLLVGLVRQQRLRLRSGAQQPHHAARHPDPQLCRRGRRRLLPQSAAAAAAGPGAPRAAAGAAQRDPPRRGRRTSLAALQLPAAAPPVRLARVRRAPQPPGLAVGPRQLPKRLPELRQPQRL

SEQ ID NO: 74087 - protein, 102 aa, Homo sapiens
LLRPPRSCLSSGPGLGFVLGLGSFCAPRCPVCISAPPAGPPRSPPARFPRCPPSLPPTLSRGSRPSTPFGRGPLAPPGRAPPPPGPAAPDARAPRGCWRPGP

SEQ ID NO: 74088 - protein, 32 aa, Homo sapiens
LPRSCAAPASLRLAGAAETSMAWWQWLAPGWP

SEQ ID NO: 74089 - protein, 119 aa, Homo sapiens
LGGLGAAHLLLSGECVCRAAGGLRLPPHLHGFLQPGLPVHCPYPRRLGLPRWRPGGTQANHGGLCGPASAPGARQCDAHAAAGAAAPAAARHAAPEPGAGFLWLRAALQLGISSLLPAP

SEQ ID NO: 74090 - protein, 55 aa, Homo sapiens
MKFLWWQKAFSQRMEVAALLVFRTCWIRSLCVWPQPLETSYSAVSAHNSWSVLGV

SEQ ID NO: 74091 - protein, 45 aa, Homo sapiens
VCSERQRRLLGGARAPLCPSFLLQSLGLPWSHPPPACPLVSLQGP

SEQ ID NO: 74092 - protein, 60 aa, Homo sapiens
LASAVPLRLLGLPADAAFLAPLGVPLPGRPPPASCSSCLGMGPPPGLGRPGWGPRGASAP

SEQ ID NO: 74093 - protein, 40 aa, Homo sapiens
VCVFRSDVPTVPATGRLWCTAAAGSTSAASTVWYSVFSKL

SEQ ID NO: 74094 - protein, 35 aa, Homo sapiens
MIRKAGSGCRAAGGPGGLIFNLSMPAAPFFPDQGL

SEQ ID NO: 74095 - protein, 61 aa, Homo sapiens
LRLWARGAWKRRLRRRRRRLPHGVLLHCHQLHASQQRTLSQHQGSFPGPSQQEREQNSGLC

SEQ ID NO: 74096 - protein, 112 aa, Homo sapiens
LSGSSAFAPAAAASLSAPASFDRLPPPARRRPPPPRPLRLFPPFVPSSSPFFPSSFPSSPPPPRTAGRGTSSEQQPGGVLLLSPRLECSGVISAHCNLHLPGSSDFPTSASR

SEQ ID NO: 74097 - protein, 139 aa, Homo sapiens
LGRHRGRLEALLPGGDTQSRRHRGAGCVRWLAGAALPCSLAPGCGAAAGASPCPGAGRRRAAGRRCLACECTSLTCKSGSAGASRGSASRPAQARAAGSGTRQGRPGAAALPRGASGHPPILSLFSSPLACPRAKPRSA

SEQ ID NO: 74098 - protein, 43 aa, Homo sapiens
MDSPTPRPSCRCLPLTMLLGPLPPHCSPRTSQAPSFLPQRKEL

SEQ ID NO: 74099 - protein, 160 aa, Homo sapiens
MRGGCGLRLRQRTRVGSVAAGGVASCAGRPRGPERRDKQSARLVLAPAELSTSAPAAPVSRPGEQGHAAYAAESEPTGCLVKPTPEPPAAHRAQTESPSVTQAGVQWHDLGSLQPPPPGFKRFLCLSLRSSWDLQTCATMPGKFFYFCKDRISPFCPGWS

SEQ ID NO: 74100 - protein, 69 aa, Homo sapiens
MLLLPWPMAFRLLAAADGARQTTGQDSSATEHWPQSRPEQQPPSHRPPPPPHPGAFPPPSGLLRPRHRG

SEQ ID NO: 74101 - protein, 46 aa, Homo sapiens
LCVCVCVCVCVCVCVCVPMSMYRVRGGRVAGGCFIGWRAPCPRAIK

SEQ ID NO: 74102 - protein, 64 aa, Homo sapiens
VMCVLAFLTTPLLCISFFHFLFQAFLFLPCGNSFGASDCSSSECAAIPVDPVPGLQLLHLCQLS

SEQ ID NO: 74103 - protein, 50 aa, Homo sapiens
LGGVHSTFLPSHRKLSSAVGCWGRLMFGSLSTLPIPDSPSHSFQSPQGDT

SEQ ID NO: 74104 - protein, 114 aa, Homo sapiens [sequence omitted]

SEQ ID NO: 74105 - protein, 44 aa, Homo sapiens
LPSLSLLSLSPMQPSEVMGVNSPRGYRFTLAHSSPGSWGSLLPQ

SEQ ID NO: 74106 - protein, 132 aa, Homo sapiens
LRTMGAGTVPVSVAVTGLHVVLSRVMVDSSREGPGVLGTLPGAVCGLSAGTRTEPAAVRLWSWTCRLSLGQIMNLILRKCGINIAWSSCLLLISALVCFRSRFIFYFYFFNLFFVTESRSVAQVGVQWRDLV

SEQ ID NO: 74107 - protein, 45 aa, Homo sapiens
MAQAIICGALSVVCPAGRAGVTSARNPDGVWRGGAAGEPGPDRPR

SEQ ID NO: 74108 - protein, 130 aa, Homo sapiens
MGHRPAGGMGGLGLLGRAPILRGAAGEGPGNPDHAQLARVRLPPGHQLFLAHHRAPGPGTDPPPRAALGDPGGALQLAASRDLLKICCVPSTALALVGTQNSPNPCMHANKNVKITTETSLRRARYRVLV

SEQ ID NO: 74109 - protein, 22 aa, Homo sapiens
MKKSCRWVFFLITKSLFKETVA

SEQ ID NO: 74110 - protein, 34 aa, Homo sapiens
LRKLQRPKLFPEKRSFTGVPALRNLCSTKLQMLC

SEQ ID NO: 74111 - protein, 31 aa, Homo sapiens
LSLRNMLVQSLFSLASCTRMLTGERAAPSTC

SEQ ID NO: 74112 - protein, 104 aa, Homo sapiens
MLSILFLPVSSIISISYGQSIVGNWCWLTLHGRIEKSSCESLPKAAPQWSLWLEVHGPPCSCPWRTPRVPSILLRPTLFKNIYSMYAYMELKCHYCNLESALKY

SEQ ID NO: 74113 - protein, 27 aa, Homo sapiens
MVGSLVLSAPFPILWGGEQSWSSIMPA

SEQ ID NO: 74114 - protein, 17 aa, Homo sapiens
VLEAFATRSEAFIAHRG

SEQ ID NO: 74115 - protein, 55 aa, Homo sapiens
LMVINGKRHALSLFPSLISKQCICREMGRSHFLLLSLGRRTLSLEKLSCLHKLEE

SEQ ID NO: 74116 - protein, 92 aa, Homo sapiens
MASLRARPPPRCTCSWWTASPSPTCLSRRRPRPRPRPTCSPSTWWWRWPRCLRSSSFRCSCSWRCGCVGGAGRPRWVAAWCPRAPFQGILWT

SEQ ID NO: 74117 - protein, 85 aa, Homo sapiens
LSALLLFGLVLELTPRVGRARWWRRPSQITINKISTRENVEIGVADTLDILDEIQAVNFCNVREKPTLLVTCVNHCVIALVIVSI

SEQ ID NO: 74118 - protein, 201 aa, Homo sapiens [sequence omitted]

SEQ ID NO: 74119 - protein, 68 aa, Homo sapiens
LPSGAFSTCCCLTGFLSEPHALRPLIPGRKGWSPQHPQHPGKWGARLCQRPSRSTRRCSSPITPSCRP

SEQ ID NO: 74120 - protein, 67 aa, Homo sapiens
VPRAFSTCCCLTGFLSEPHALRPLIPGRKGWSPQHPQHPGKWGARLCQRPSRSTRRCSSPITPSCRP

SEQ ID NO: 74121 - protein, 51 aa, Homo sapiens
LFSSGKIALASSAFISGAEGLTGLEIAPEKSIRGVRRLVPHCRARRSRWWL

SEQ ID NO: 74122 - protein, 59 aa, Homo sapiens
LALPPRACSPPSPRLHPPRSRKRQLRLRGWRRLPPPTTSALAALALRPSPAAAPPPRRR

SEQ ID NO: 74123 - protein, 27 aa, Homo sapiens
MFMSLPTILCGFTSFQMDWSALPVASM

SEQ ID NO: 74124 - protein, 27 aa, Homo sapiens
MFMSLPTILCGFTSFQMDWSALPVARH

SEQ ID NO: 74125 - protein, 47 aa, Homo sapiens
LSSQADSLFPLRRTSQQGWSVSSLRGPSFSSPSRPWRKSGSSPPTLI

SEQ ID NO: 74126 - protein, 67 aa, Homo sapiens
LRRFSPRKCLLRFPCSSVSHTLSISFCNFQAFPSNCMYLVTCFQAGSLSGPLAWGKPPHLLRVLFRV

SEQ ID NO: 74127 - protein, 33 aa, Homo sapiens
MTFSKDLSFCRLASELCLLGATSLRQLRMWMQI

SEQ ID NO: 74128 - protein, 41 aa, Homo sapiens
LSWAPWKPAAQARLAVLFCGFPLPGFRNAACLSVSPSVWWG

SEQ ID NO: 74129 - protein, 68 aa, Homo sapiens
MPAARAADLAAPAGAALCAAAGTLAPVEPGSRCNSSWMVAQPVRAGQGLCSTWRGPPIPGCRTLCPLT

SEQ ID NO: 74130 - protein, 72 aa, Homo sapiens
MKHMRTELITAIFCRKLISRIKIQRLFFLFTHQLPLPARPLRPLQPPPPPPPPPPPPGRSRRRRLLCIPITA

SEQ ID NO: 74131 - protein, 74 aa, Homo sapiens
LRASPLSSLCLACLTSKGAGPLWTHLAPQRKLPAGGPPPERWMSCSKGELLTLGPFEGVSFGLFSCFLHKSKFV

SEQ ID NO: 74132 - protein, 38 aa, Homo sapiens
LEALETIIGTLRRLLGCLTLTLSGRILNPSWVSSTGMP

SEQ ID NO: 74133 - protein, 133 aa, Homo sapiens
MISCPAGLCTWGWTLPACTPVLSLGSQDRTGWDSRIDRTASPMEGAPWQGRWTASRSRERTWLTASQRGHGDLSPTAARIGILPTSGAWKPILPQNRQKGTQPGRCLNFSPLGPGAKKPSHTEPGLLTARTGS

SEQ ID NO: 74134 - protein, 64 aa, Homo sapiens
VLLPRLLTLALWLGSACRPLACSLRGKSCFLSAPFTHARARWAVPSSPALLLLLVLANAAVGED

SEQ ID NO: 74135 - protein, 55 aa, Homo sapiens
LQKASFLLCSLHPPISHAALGQTSTGLSWVWGQHGAGGGRAALLAWRKVEWLEPR

SEQ ID NO: 74136 - protein, 49 aa, Homo sapiens
LERRAPLAPSASSPGAAATRAGFLLPCLPAVPLARRSLHFPGEPKRVWP

SEQ ID NO: 74137 - protein, 29 aa, Homo sapiens
MVPQLGAGHASRSVAPALALFPAAAPGRA

SEQ ID NO: 74138 - protein, 31 aa, Homo sapiens
KARAGAGTLGLAVFSSCSAVGGGGRNQSLGD

SEQ ID NO: 74139 - protein, 33 aa, Homo sapiens
IRRRGKWTQDLTGLSLLLAGHGGFGGRCKVYCG

SEQ ID NO: 74140 - protein, 36 aa, Homo sapiens
RCASRVMPGEWKDLTGLSLLLAGHGGFGGRCKVYCG

SEQ ID NO: 74141 - protein, 49 aa, Homo sapiens
MQFAARRTWRWSPELVVSRPPAAAAATAAAAGGGGRAGATEMRRRRARL

SEQ ID NO: 74142 - protein, 37 aa, Homo sapiens
MPSWGPVGPTYKSSPWEPGCLALLPGSVSATWSATDP

SEQ ID NO: 74143 - protein, 47 aa, Homo sapiens
LPPLRCIRGARTDLMAWATGVVPGTSRALAAPSLQGPSAPGRTWATG

SEQ ID NO: 74144 - protein, 71 aa, Homo sapiens
RSRSLCCSFLLQLLLEGKDLRMSPQKQPPRSPRLPLQFPREQRNLLATPRKKMTVVSGRARWLTPVIPALW

SEQ ID NO: 74145 - protein, 64 aa, Homo sapiens
VESGDDVQKWHLERGRKRRKNRSSASDLRWLKERMYLVSAISLHPSMTLLSMSLIFLARKPSAV

SEQ ID NO: 74146 - protein, 65 aa, Homo sapiens
TFPSALFSPGRAAAAAAAAAAAGGGARWRRWPGSPWRTVKEAAKKKSATTTTVILEIIIMDRVIP

SEQ ID NO: 74147 - protein, 36 aa, Homo sapiens
LAAVGWKELVCSHLLACASGLALSPDSRCKGALCER

SEQ ID NO: 74148 - protein, 40 aa, Homo sapiens
MGLWARRACSSATQLTLSPKSTSPPCSTITARRAQLTGAQ

SEQ ID NO: 74149 - protein, 85 aa, Homo sapiens
MPRPASTRAWCAHALTCAHCLALPSEMNPVPQMEMQKSPVFCVAHAGSCRPELFLFGHLVSSRELEIPCLPLTSTGSRWEENSCD

SEQ ID NO: 74150 - protein, 55 aa, Homo sapiens
MKDELARGRIASRSCAALAAAGTPCSALSLGPETSHSPHTPPPQLRFSGGRGEGR

SEQ ID NO: 74151 - protein, 37 aa, Homo sapiens
MQTAARRWAQLLSPLTMMTRLLGATPVRRILSPTRCP

SEQ ID NO: 74152 - protein, 26 aa, Homo sapiens
VAALKKNATLLFLSPTSGSAGVLRMH

SEQ ID NO: 74153 - protein, 34 aa, Homo sapiens
ISCVASSLVLVPPGSGSQDRLSSDPSAATVAAAV

SEQ ID NO: 74154 - protein, 72 aa, Homo sapiens
LKPSGRRRGLTLALGSSGHCSGPRLLLLTSALRLFSIGVEAPPVLSCLWREANLPLDQREEKAETGSNAVDW

SEQ ID NO: 74155 - protein, 24 aa, Homo sapiens
RLTAIFLFQLILPRCISQKTLIHR

SEQ ID NO: 74156 - protein, 71 aa, Homo sapiens
LVSEGPFCFQGGACEKWHLERGRKRRKNRSSASDLRWLKERMYLVSAISLHPSMTLLSMSLIFLARKPSAV

SEQ ID NO: 74157 - protein, 43 aa, Homo sapiens
LPRRGKHHRTSANTGLKIVIHLPPPLPFFFLELLRSPVGIPAD

SEQ ID NO: 74158 - protein, 47 aa, Homo sapiens
MLCISLISMETSELVLLLLTPHLAPSLPPRVFASICGLALYLGTGSL

SEQ ID NO: 74159 - protein, 32 aa, Homo sapiens
VARRPGTESESTVASAAAAAAAAVATAAGTRS

SEQ ID NO: 74160 - protein, 24 aa, Homo sapiens
RGAEVAAAAVAVALVVFQSPRLAL

SEQ ID NO: 74161 - protein, 64 aa, Homo sapiens
LKTNGSIAVCEVLENCLVSVCLFACQCSPAPSCPGHHPDVMPLLQLRGFIFSILTLALNAFGDG

SEQ ID NO: 74162 - protein, 33 aa, Homo sapiens
MLQSRSEVPLASSSLLHGQSLPSPAVPPGYIQE

SEQ ID NO: 74163 - protein, 50 aa, Homo sapiens
LASTWVLRNVPRHPCHSVVGALLPPPLLAAFSSAAHTDAQSQRGWHGLAV

SEQ ID NO: 74164 - protein, 41 aa, Homo sapiens
MNDSAFPLRGMWVLRMVGVKLPLLSADSTSSLNAEICKKGK

SEQ ID NO: 74165 - protein, 141 aa, Homo sapiens [sequence omitted]

SEQ ID NO: 74166 - protein, 45 aa, Homo sapiens
MEEITRFWMSCAHSVFATGLQSVLTSISSVTISYQEETCYCRHVL

SEQ ID NO: 74167 - protein, 50 aa, Homo sapiens
MGRWGVFLKTRITVLISLLTSCILLGKSLLVSISPSTEEKYFTELLWGLS

SEQ ID NO: 74168 - protein, 39 aa, Homo sapiens
MLLCTWCLLLRIYSPHFSQRITVGSHCHNIIEMLATRFM

SEQ ID NO: 74169 - protein, 82 aa, Homo sapiens
MTSGTSPPNSTIWEWQTDSAPGEHHIKDKCVCLKMASFGLAWWLTSIIPALWEAESKCTVLVKSAVAYSNVQGFHIHSPLAH

SEQ ID NO: 74170 - protein, 89 aa, Homo sapiens
MQDSTACGSCSGGLLLTRPSTLPLARSAAPCLGLSALPPLPVTAGHDIGQDAAEGTRHAKKMAHPPRHRRPVRPPGSRRASTGLPGGDS

SEQ ID NO: 74171 - protein, 89 aa, Homo sapiens
MGLAAVRKDFRCSGLFTVVVESCLGPQAPSAAPGSPTGIHQTRSVSGTLGRTPGVAFSSPSMTSMWSIIQGATLMSWRSMEAPISTLPE

SEQ ID NO: 74172 - protein, 63 aa, Homo sapiens
LAKRSFSSCSSTFSLVRVFLNSVLMASASEKSTESCRSRTPGTLLRRRTAEERVAYTPPGDEA

SEQ ID NO: 74173 - protein, 33 aa, Homo sapiens
MMSSARLSRSTSTRALSLVSWSTCRRSSRISSS

SEQ ID NO: 74174 - protein, 38 aa, Homo sapiens
MMGSQLLMTSDLKIVLSLFLLRAVKGWIISGVATPGLA

SEQ ID NO: 74175 - protein, 73 aa, Homo sapiens
LLSSRAGFVALVTPRGRRKEPGRFDLCGLDRAGQRGTDPLRSRASSFWGMLIRGCAPCSSFMQALGKAGAAAA

SEQ ID NO: 74176 - protein, 65 aa, Homo sapiens
LNVSLSLCFQMTQCCLSPLNHLPQSCSKVSAAQKLNGLLVMQILPPGQEVLLLLVLPVLTPTGPL

SEQ ID NO: 74177 - protein, 46 aa, Homo sapiens
LLLLFLLIFFSWCVWWLFLSVEGKRRYHPRLSPTPLQNGFSDTPAV

SEQ ID NO: 74178 - protein, 58 aa, Homo sapiens
LLLLFLLIFFSWCVWWLFLSVEGKRRYHPRLSPTPLQNGFSDTPGSEGVGSPGCARSK

SEQ ID NO: 74179 - protein, 35 aa, Homo sapiens
VLSCYGIPLLSFLLSNQVECFTGTWFIQLKITWDL

SEQ ID NO: 74180 - protein, 49 aa, Homo sapiens [sequence omitted]

SEQ ID NO: 74181 - protein, 51 aa, Homo sapiens
MRPASLRTSLKATASCRQPRTQMRASLGVCGTASSMVTMATTSGSMSAMGS

SEQ ID NO: 74182 - protein, 80 aa, Homo sapiens
MSLGMWQHQWDKMDTGPPSQAPDTGHGGETSPPWPPWLPRFARGCSSVRLPLCTTVALGPGLPAHWPSPPSPAASYQQFL

SEQ ID NO: 74183 - protein, 47 aa, Homo sapiens
LGWRRWKHWWPGLFFQRGQPWLLLCSSLSARSLPLQGAHLPGDRGSS

SEQ ID NO: 74184 - protein, 53 aa, Homo sapiens
MSVYSCSFLLMSSAAQHIEMAQNVPGLGETQQRPMLTGCPHSACSHLPLGTCL

SEQ ID NO: 74185 - protein, 75 aa, Homo sapiens
MSDSCQRQQQGDTKWRRLSSYPWRRRQRWRRRRHLLQAAAAVSQAAAAPPAGAVAVARSQICLKTWIISIFVMDC

SEQ ID NO: 74186 - protein, 79 aa, Homo sapiens
MALGLPLRACGLWNMSSRLCSAELLFCKETQSSLNLATEIRDSGALSFLGMDYGPVPHLSGALQMSWRSIGQRTKIHSR

SEQ ID NO: 74187 - protein, 126 aa, Homo sapiens
LPDYSPTLHWCLITTGMPALVIHPHSLGDKSIAGTPALAAHPHCSPGLLNAPRCPTRLLRASTLSFLGFTSFTMGNLPPSIPPSSPLACVLKNLKPLQLTPDLKPKCLIFFCNTAWPQYKLDNDSK

SEQ ID NO: 74188 - protein, 118 aa, Homo sapiens
LMPRVLAGLPANHAAAAAARSCLGAACAPATAGGADAAPDRRKAIPRPRLPAARLDAAASGGRGLRSLPARRVRRAAGLPGGQGARRVRLLLGMRQPRGPALRPGPQCSLLRALRRAA

SEQ ID NO: 74189 - protein, 34 aa, Homo sapiens
TAAAVAAAAAAATATAATAAGPGPGWGLESLQWG

SEQ ID NO: 74190 - protein, 38 aa, Homo sapiens
MHLSGWERWGQRLSCVPAALSAQESPAQSTASQHGEQP

SEQ ID NO: 74191 - protein, 45 aa, Homo sapiens
MCLSFTPPLSAATAAAAAAAAAAARIAAAPSLARRRYLLGQKFYE

SEQ ID NO: 74192 - protein, 73 aa, Homo sapiens
LSPSTATLMNGRYGRAALTQFCTLTCGGGQTSCWWLLLMPTLWGRWPVASVTTCLPASCGPGTAASPCSSARP

SEQ ID NO: 74193 - protein, 66 aa, Homo sapiens
MFLERKNLKMGFLCLPRSSMRSSTVGILTLSSLQKKRILFIPSLVWLLLQTQRKKKERQPQKRRKK

SEQ ID NO: 74194 - protein, 24 aa, Homo sapiens
MSFLLYCLSRITAVSSSKGRLLST

SEQ ID NO: 74195 - protein, 45 aa, Homo sapiens
LAAARSSGPRAAVSVSASLGPWVSSSLPFSGSAPSRSVPRFPAGL

SEQ ID NO: 74196 - protein, 73 aa, Homo sapiens
LAPFTILPYPLCSFLLKSVLSAQEWDSPRKESTFLFWEAQTVHFGAGTNMCLVNLLENSHHLLPPSLYSEKPD

SEQ ID NO: 74197 - protein, 50 aa, Homo sapiens
LVGSSSWPRQTGGGSGPDCGAMAVVSSFAAAASLAESPASALGAPTASAG

SEQ ID NO: 74198 - protein, 105 aa, Homo sapiens
LLPLLTSVLFGRAPSTHLWIHLGALGTMGWWNGCSEILEEWCPHFADTPATLTALPIVLPTYLLPQSLAGEGRWPGAISLQRRGSCFDYHLHLTGQALTLPFIQV

SEQ ID NO: 74199 - protein, 41 aa, Homo sapiens
LPPASMSPPAAAAAASASRARAPASRSRSRCLGHWPPDPRL

SEQ ID NO: 74200 - protein, 73 aa, Homo sapiens
TGRSAGAAARRRRAVRWELLVLLLLLLPTLRRPGPRCRPGPGCRLRPRRPRPRVRPSQDAAPGRVSTSWPHLP

SEQ ID NO: 74201 - protein, 66 aa, Homo sapiens
KAGGRGPFPCLFLCPASAASRLSGSGLSVPFAVTSSAPSAWKVLHHGDRQVPSRLASGRNFGAGSP

SEQ ID NO: 74202 - protein, 79 aa, Homo sapiens
MPTLSRPCGITPSSLTLSWRASACTAATWSASAAAPSRSKVTCAAWSWGTTASQRTTKRRQPPSTPCRACGGWTCQETP

SEQ ID NO: 74203 - protein, 55 aa, Homo sapiens
RNPARKDIGGGLALKLLFKTRKRRRKRKKRKMLGNIYLTCSTARTLASCCYSCKY

SEQ ID NO: 74204 - protein, 55 aa, Homo sapiens
REVAGRKGGLRAPPASRAPRGRSMLPTAAGFSIWGQVGAAGSRAQVVRPMRRAGG

SEQ ID NO: 74205 - protein, 52 aa, Homo sapiens
TKAPIRRLPHCKTTWLSLCTAMSPLTTEIWALRRGNSSASWSRAASGGRRSP

SEQ ID NO: 74206 - protein, 71 aa, Homo sapiens
KVPAHGPPLIASPSRPRAPRGARGRRGPAFAAVAAGAATEAAAAAAAAPAPLAPARRAAAAARGPPLPRLP

SEQ ID NO: 74207 - protein, 9 aa, Homo sapiens
ITGIYFLFF

SEQ ID NO: 74208 - protein, 70 aa, Homo sapiens
VPAHGPPLIASPSRPRAPRGARGRRGPAFAAVAAGAATEAAAAAAAAPAPLAPARRAAAAARGPPLPRLP

SEQ ID NO: 74209 - protein, 16 aa, Homo sapiens
ILIVTLLFSPCVTLEP

SEQ ID NO: 74210 - protein, 30 aa, Homo sapiens
IMLLCLLQLAAPLCSYSITIRFYLFWLNTP

SEQ ID NO: 74211 - protein, 35 aa, Homo sapiens
RSSVGRRVLLLSSAASWRSRAARPCTSSFPSRRPR

SEQ ID NO: 74212 - protein, 23 aa, Homo sapiens
LCSLILSCLFVVLKGRSFVLWVC

SEQ ID NO: 74213 - protein, 29 aa, Homo sapiens
VKSVPQLLISVFFVSNSFITKKEKKYCSE

SEQ ID NO: 74214 - protein, 32 aa, Homo sapiens
IRRSKTDISSVGGSFFFFFFSHPSGSGRFVIF

SEQ ID NO: 74215 - protein, 130 aa, Homo sapiens
LRMSEHRNEALGNYLEMRLKSSFLRGLGSWKSNPLRLGGWTILLTLTMGQGEPGGPQGDPWVPHELLLPSLCDSSHASSWGSGSITCAWRGGDSSSHPLVSGHILSNSPVAAVMCSSMGTHLSPFKGTLL

SEQ ID NO: 74216 - protein, 58 aa, Homo sapiens
LYSSLLLPSSHFLVCSAAVWAWAMRQGRFPIRAPTCPQSLERDSNPASMSRSLQPPSS

SEQ ID NO: 74217 - protein, 32 aa, Homo sapiens
TMTACKRWAMSVTVGCSGITSCLHLPSIPVSW

SEQ ID NO: 74218 - protein, 98 aa, Homo sapiens
LAPLQRSPEVPAYTRPACKPPVGPHSSSASVPLWLSSGTPAEAHLPLLNSRLESWQDPVAGLGMELSALCVGGLGLCLHPAQGCPSLGSPAWLLLGPE

SEQ ID NO: 74219 - protein, 56 aa, Homo sapiens
KLHKAREITAGGKSMMGSRVLRTGKLLEAAGAGPGSPALAVFAFGRGQSLLFQVPA

SEQ ID NO: 74220 - protein, 81 aa, Homo sapiens [sequence omitted]

SEQ ID NO: 74221 - protein, 29 aa, Homo sapiens
MAVVSSFAAAASLAESPASALGAPTASAG

SEQ ID NO: 74222 - protein, 41 aa, Homo sapiens
MEYKKTTKAMKKRRMFYLHPISKPLLSCYCMSLQAQYRASS

SEQ ID NO: 74223 - protein, 63 aa, Homo sapiens
MFIGVGPARGSTLPPTSWCWLAPTALTSWTRPSCGLAGFIARFTLVPLTLKAGPPSLRSTCAH

SEQ ID NO: 74224 - protein, 68 aa, Homo sapiens [sequence omitted]

SEQ ID NO: 74225 - protein, 56 aa, Homo sapiens
MTVVFSLLGTLRAPAPFSSPLQGCRRSRCDYKDFSGIIASSHVRSGWSWRVRENEF

SEQ ID NO: 74226 - protein, 39 aa, Homo sapiens
MLRSECRLFIGCLGWGKGGWAEEVCRERGSVLLRLVQMV

SEQ ID NO: 74227 - protein, 57 aa, Homo sapiens
MWLLKPSAHSPVHILVLLFPRGWSQPGTHKRQILVNAASLPGGCLLPWIWSGAALRF

SEQ ID NO: 74228 - protein, 28 aa, Homo sapiens
VPGSVHISSQAAVAVPAAAAAAAAADML

SEQ ID NO: 74229 - protein, 28 aa, Homo sapiens
KMAAEAFGANWERSTRFLEHGQRRQEQA

SEQ ID NO: 74230 - protein, 24 aa, Homo sapiens
KIPNLLFCFISPLGVVRRSSPCYP

SEQ ID NO: 74231 - protein, 36 aa, Homo sapiens
LSPEPPCCRRLLPLLAVSPSVPALCAPPSGPWMAGI

SEQ ID NO: 74232 - protein, 44 aa, Homo sapiens
LMMWKGLCLSATENFILAVFVETAFGKRKEMNFTDLTFLHLPFF

SEQ ID NO: 74233 - protein, 39 aa, Homo sapiens
LIPGLPLLVLISPSPFQGSTLARRMKGPSWGLLATSAVS

SEQ ID NO: 74234 - protein, 45 aa, Homo sapiens
LSMAGRVAALAAGGSALSKAPGEAPPLLRAACGAGHGAATEAGSL

SEQ ID NO: 74235 - protein, 87 aa, Homo sapiens
MVTNPCSLLPLLLPPQTKSSTCTVLLAKKKLLYLSTGPHGLTETPNQELILQISEGRTLILTSFSSGAQEKEQQGERKKQHLPREAA

SEQ ID NO: 74236 - protein, 46 aa, Homo sapiens
MASSVTTISLLLLASFTSLSCVWYFMFSCQDCVDLQILSLPDEVTC

SEQ ID NO: 74237 - protein, 44 aa, Homo sapiens
MSRNYCMMCSSHQTATLGLSFQFSSATLWSRIERRLFANCRKWS

SEQ ID NO: 74238 - protein, 74 aa, Homo sapiens
MQNSSLFHRGTDFLLLLPFALSPPPPGKKRRRRRSAGIATGRATEAVRKVSVWECGTGAGLVYCSEQWSQPSGR

SEQ ID NO: 74239 - protein, 51 aa, Homo sapiens
MIAALSCAWSTGHLQFGLSRSKLVFCLSCVCWEEVTWDSTTIDEESEKVFY

SEQ ID NO: 74240 - protein, 49 aa, Homo sapiens
VSHCPGSVGPVRLGLGAGAAVAPAAAAAMEAMPEPRTHAGGGRDSRRYS

SEQ ID NO: 74241 - protein, 103 aa, Homo sapiens
VAAVGSRAQTGAILPEAASRSWGRPGGRLKLFFCLFCSLGLGEDLEVWAPSSPLETAMVSSNHHHLTTLHGGCPLRAASAAALSSPLYLSAPEPQSSFRPRDR

SEQ ID NO: 74242 - protein, 40 aa, Homo sapiens [sequence omitted]

SEQ ID NO: 74243 - protein, 34 aa, Homo sapiens
LCREARRWQTAVLPMFICYAIMTVRISHLEWLPP

SEQ ID NO: 74244 - protein, 37 aa, Homo sapiens
MPVVCVLFSLFLTCVHDSFDSASKSKSCVVTGAFIYL

SEQ ID NO: 74245 - protein, 40 aa, Homo sapiens
LRLRFMAALPPLLGSVGSWGARSGPEPELASRAETCAPRL

SEQ ID NO: 74246 - protein, 77 aa, Homo sapiens
LTLLLPRVLSHLAAAAPVQTLTLPPKAQPSPNNPQPCTDVGCESLCLSKNQALLETFKQRLDNYFSRTERKLMHQKR

SEQ ID NO: 74247 - protein, 59 aa, Homo sapiens
LARTKRAISLLPLGQACFTAGPASGASTDRGSEASQAPTRSPNAHALRSAPGGGRRSRR

SEQ ID NO: 74248 - protein, 86 aa, Homo sapiens
LPGLQLCLSLSSPPAPPFPAVPGMVPGTPRTPRLREVRGLAGEGVWGWSAARGAGCIFSSFYGLPHLCIPSSLNLTRSEQWTASSL

SEQ ID NO: 74249 - protein, 30 aa, Homo sapiens
MRSTATTLSSATASPSIGASPTTGPESADR

SEQ ID NO: 74250 - protein, 50 aa, Homo sapiens
LRPCVTLFPLYPFALSAVSSGGNHPLPRLLDPFAEALARARVIPVLLTQA

SEQ ID NO: 74251 - protein, 48 aa, Homo sapiens
LQNWLSQVAAVSAASTVNSKTTLPVLQAGKLLNQEAVLMLLTAPEVRD

SEQ ID NO: 74252 - protein, 51 aa, Homo sapiens
MLFFTTNFVLSECLSYASCNAYFLISNVSIKPFFRYKENYFKLSNSEKLKI

SEQ ID NO: 74253 - protein, 61 aa, Homo sapiens
MMLCGALGNCVCITSYFWPQVIQTSALCPGGEPLGTCAHKHQFWLLPYPSFAIPNYAINKF

SEQ ID NO: 74254 - protein, 99 aa, Homo sapiens
MKVWLFSIISFSWPKPKGIKKSLECLPFHVTFKRLLKSKCPLLLAARVGGERCLALKVYCFFCSSSISQKIHSTPFWGPNCNAQNNKCLHENYLLRIFI

SEQ ID NO: 74255 - protein, 44 aa, Homo sapiens
LRQLQEGCMAGKKLLKTGWVSWLVPVIPTLWEVKLGGSLEGLTL

SEQ ID NO: 74256 - protein, 55 aa, Homo sapiens
MKQKLRLTLSSPFLSWTCPKLEAGGGWSAGMLQKSHGRAPGVHHMCTLLHDQMEI

SEQ ID NO: 74257 - protein, 58 aa, Homo sapiens
MGGRLVFTTCVHCCTTRLALCMWETIREWWGMLKRHHWNPTVPQTRAFPSLPLPQMEI

SEQ ID NO: 74258 - protein, 37 aa, Homo sapiens
LKIPKKKKKKKKKKVVTIAFSVSYLFWFAETSPKQEI

SEQ ID NO: 74259 - protein, 90 aa, Homo sapiens
MFSLAFLNCGQCLLISSSFPFGKADITLSMLGECTRTYGSGKIWYLLAYTQNDHSPTSVQGKAGFPWRGSHRTSCSSPCAVCLERGPRPY

SEQ ID NO: 74260 - protein, 40 aa, Homo sapiens
LALWFRGGLGFGLRPAAAAAGPLRGGPESCVRHAWLPAFL

SEQ ID NO: 74261 - protein, 72 aa, Homo sapiens
MFPKCLKLVFGFSTLDKCGSAASGARPFPLPAPLLSSTQPSGRVGSGGRGAGPSPAGVCALVRAAPGASPAA

SEQ ID NO: 74262 - protein, 38 aa, Homo sapiens
LLPMCSLLSLATHHPLPQVRRVQCVILTHLCPHSLAPA

SEQ ID NO: 74263 - protein, 37 aa, Homo sapiens
MVMCLCILSPLCIASKSLRVCTKSYMKAMGKPGCQWF

SEQ ID NO: 74264 - protein, 42 aa, Homo sapiens
RRRRSAVGSVSARGCGGAGGSSLSGFSLGGGGGGSVDASSAS

SEQ ID NO: 74265 - protein, 77 aa, Homo sapiens
MRFSRRRSTCCCLASASSCSTRSCAGTSRRPAATATTTSRPLCPASSGATSPPPSCGASTASRTRAYSWPSTARCSM

SEQ ID NO: 74266 - protein, 56 aa, Homo sapiens
MAGTASAPRPPSGSPGRPSGCRATGLTSLLFIPTGRSSAPSLRPHTPRVILPKCPT

SEQ ID NO: 74267 - protein, 52 aa, Homo sapiens
MRFSVNAAHPHCLCLMTSSGCLCENHAVTTSSPTADDSEWTTYSAQSRNPSL

SEQ ID NO: 74268 - protein, 64 aa, Homo sapiens
MFLLANSGDSPARFAKRPTVLCVALGLHFPTAPARPGGCSMRCCACVAGGLAVRLTASGLRLGG

SEQ ID NO: 74269 - protein, 155 aa, Homo sapiens
MPLQCLPGVAMAAAGSPAAPRFPLASPSCSRYIPPAPASPTTPLASRMGRVPAVAVAPHRRTPTPSIATHAPGETARNQSWSPSIPLSWGRAVLQSLSCCVLRSPEQWGHLGLDPAFHHLAPPRPLSLKVWCCTRSPPHCHQLLCRDPRREEHFF

SEQ ID NO: 74270 - protein, 62 aa, Homo sapiens
MEQDAHYCLVLLPLSRLAVGLMPVRRSRLAAKLSWSQAVTLDLGSHWPSICIQKASLCLLAA

SEQ ID NO: 74271 - protein, 33 aa, Homo sapiens
MLCSGNTVDFALLLSWSSVLELVLSLSLCTFPV

SEQ ID NO: 74272 - protein, 85 aa, Homo sapiens
RMIRSFWFYGKTLALLPSLERNSSVVSVALRLWSLGTGWSAVRSVAMLITRTAMFPGLQPLERERAHPGYAASVSLRSPPRGEVP

SEQ ID NO: 74273 - protein, 79 aa, Homo sapiens
RMKRTPCGRMWSVTGTCSAAISTLPSSRPTCVSVRSLMSRMKMKCLMPLCCHPRSTEQAGCWTFYIPRGKGAMWSSWRA

SEQ ID NO: 74274 - protein, 39 aa, Homo sapiens
RRRCPSAAMASRLCGGALWYVCPCPSGAWMVPGTQLATS

SEQ ID NO: 74275 - protein, 32 aa, Homo sapiens
LQTARGPTCLPWLSMSLATPWAWATPQPPTPL

SEQ ID NO: 74276 - protein, 52 aa, Homo sapiens
IRTKKSRMHIRSPAHPPDPHTPMMSWTMASSHTAPLLVSLASPPADSESRIG

SEQ ID NO: 74277 - protein, 69 aa, Homo sapiens
MQRLPAAFFRSFAAQGLGESVHINTPTSLSLRGRPFISSSGPGARARVTCAPCLHAARILCCFWRGLHR

SEQ ID NO: 74278 - protein, 72 aa, Homo sapiens
MNRLAAVRWGHSLLLSGCLTVPCPCLTGPSISAGELSSADKPAWHGALPLLLVPDPFCPEENFLSPGDAWPR

SEQ ID NO: 74279 - protein, 161 aa, Homo sapiens
MPVGSLPHPGCLWAAFLTLDACGQPSSPWMPVGCLPHPGCLWAAFLTLDACGQPSSPWMPVTWFPWGLPKLRDPKPPSNLMTRLVSEHTCVVPEPLTNPLCNPAHAFPILKGPAHRPAHVFPLPLLCPYLVGSCPFWALVWHFTHKCVLWVVSGPPPAVRG

SEQ ID NO: 74280 - protein, 43 aa, Homo sapiens
MSEGTALLLLQSLRFCSSAMPCGTTSCPSLGCGLKTTKDCPQW

SEQ ID NO: 74281 - protein, 23 aa, Homo sapiens
VSTPLLSFLATLLQSSTNYPCPG

SEQ ID NO: 74282 - protein, 48 aa, Homo sapiens
LLLLLTTTTTTGAASAVPGVSSCSGHTAPGDCSSSNQNLGLTGTLAPK

SEQ ID NO: 74283 - protein, 31 aa, Homo sapiens
VAAASLAAAGVGAAAAAAAPAGGIKWRISKS

SEQ ID NO: 74284 - protein, 71 aa, Homo sapiens
LTRRKVPSPLATSLPALTAHAVILVTEKRAEPLPEGRGQDPAGHLLSTLSSLWERQGQQREDLEPGLMTHL

SEQ ID NO: 74285 - protein, 86 aa, Homo sapiens
MDWQGRLPWAGCTGSASCATLTARKSQIPASVRSSSWRWQSSWSQKAGRMQVMSTSALMTVGWLPKEIQKADFRQTLSAFLMGFAS

SEQ ID NO: 74286 - protein, 38 aa, Homo sapiens
MRLPTLLPSSPWPPLACPPVLLHQPHCPPSAPPTLWSF

SEQ ID NO: 74287 - protein, 110 aa, Homo sapiens
MPALVIHPHSLGDKSIAGTPALAAHPHCSPGLLNAPRCPTRLLRASTLSFLGFTSFTMGNLPPSIPPSSPLACVLKNLKPLQLTPDLKPKCLIFFCNTAWPQYKLDNDSK

SEQ ID NO: 74288 - protein, 36 aa, Homo sapiens
MKMELKFIFPLHMVSPAVSRVFCSSLPASQSFINGR

SEQ ID NO: 74289 - protein, 103 aa, Homo sapiens
MKSSSCPLLAASGPGASTPQRPEPSSPFALGWISAPEGDVEKRLPKSLEGPLQSSALKRKEREAPQESPRARKKVMRAPATSLSCGSTCLEHPGTGALRKCWV

SEQ ID NO: 74290 - protein, 39 aa, Homo sapiens
MPQALRGTQSAGAAGWVAAASSSGRLGSNIRNKCRQGPA

SEQ ID NO: 74291 - protein, 25 aa, Homo sapiens
MMTSLTWGCSLCPGGLLCAAFCGTV

SEQ ID NO: 74292 - protein, 88 aa, Homo sapiens
MPPWPRGLSSGWRSCWWCSSGRSTWSASGPPAAAASTWASGGGCALPGSPFPSSTSSWSWPPWWSSAWAPRGRCLPRRPSGASASCRS

SEQ ID NO: 74293 - protein, 33 aa, Homo sapiens
MYWAMSLHGTAMATMSPRSLGASSHRSHPSGCS

SEQ ID NO: 74294 - protein, 49 aa, Homo sapiens
MQGSGHRVQTGSLIVSATGLRPAPTWSAGATRLEQSSNPLLLGKLPGSR

SEQ ID NO: 74295 - protein, 28 aa, Homo sapiens
MRGTRESPREPAKSLAAASRAAAAAAAA

SEQ ID NO: 74296 - protein, 48 aa, Homo sapiens
MLGQRHSVSSRPSKGLDRLFSLLLPVGLFLKRMAELPTCSNTIRTKVA

SEQ ID NO: 74297 - protein, 71 aa, Homo sapiens
MEPLVVSSLLRAQASRQAHHPPAQEACGSRGALSMAAPLRHLRPPKSAARWMRTMALEKKCRRKASRFQLQ

SEQ ID NO: 74298 - protein, 44 aa, Homo sapiens
MEPLVVSSLLRAQASRQAHHPPAQEACGSRGTCTAPSLRMTWIQ

SEQ ID NO: 74299 - protein, 32 aa, Homo sapiens
MPGWQQWSSLGRFCSSMSTLGLSSPATATSST

SEQ ID NO: 74300 - protein, 40 aa, Homo sapiens
MVRPLCRCPRAPPAAAASCPSVLLLLPRLLLLLHLQIGSR

SEQ ID NO: 74301 - protein, 73 aa, Homo sapiens [sequence omitted]

SEQ ID NO: 74302 - protein, 89 aa, Homo sapiens
MLISVSSSWFMCSGGFGVGGNADGSWGRGGYSSGYPSLESGPGRHGPTCIQKFPGVIVMVVGTGGCIRCSWKEGAGVGISWSLLSPMRL

SEQ ID NO: 74303 - protein, 94 aa, Homo sapiens
MRPGSPLAQRDSGQGRGRSGVASCSRGGWAAAAAAAAAAAAGAAAETMSGQRRGLPPPPPPPRAGSRDGPVARTSSASASASTSGRAAAARRLC

SEQ ID NO: 74304 - protein, 26 aa, Homo sapiens
MVKKGFPHAASLSPAPLATSQDLGCS

SEQ ID NO: 74305 - protein, 101 aa, Homo sapiens [sequence omitted]

SEQ ID NO: 74306 - protein, 24 aa, Homo sapiens
MALLAGWIIELSGGTDAAAIPNKS

SEQ ID NO: 74307 - protein, 39 aa, Homo sapiens
MIRAPCTCLWGILWPMRNGAGHSWRRRCKGKLSSFSRMA

SEQ ID NO: 74308 - protein, 56 aa, Homo sapiens
MDINPGSPDSGSQSGFFSHPISPWFHRTLRRLLGCLTLTLSGRILNPSWVSSTGMP

SEQ ID NO: 74309 - protein, 133 aa, Homo sapiens
MKGARIPHHLAQVEAPATLGEAAAHSRAAVAVAAMVTTTMAAAVVAAAVAAAVAAAVAAAVVAAVATVVAAEVTAAVSPPGDPAPAPPPATTVGAAEEMDINPGTLRRLLGCLTLTLSGRILNPSWVSSTGMP

SEQ ID NO: 74310 - protein, 46 aa, Homo sapiens
MNRERKLKLSKRQQIDGILLCCLGWSPSLKRSSFLGLPKQWDYRAW

SEQ ID NO: 74311 - protein, 85 aa, Homo sapiens
MREQAAHQDFYGNLLLETAAAAAAAAARGLPAAGAEVLAARAPRPLPTARRDAHSPSTRKEVPSPVTGSCRVQIYTELHNQPKTT

SEQ ID NO: 74312 - protein, 34 aa, Homo sapiens
MQTWFQKFVFFWWVQLGLESPVFSIQSSLFFMAM

SEQ ID NO: 74313 - protein, 45 aa, Homo sapiens
MGFHHVAPAGLELMSSSDSPASASQSAGITSVSHHSCLYTSKGVE

SEQ ID NO: 74314 - protein, 106 aa, Homo sapiens [sequence omitted]

SEQ ID NO: 74315 - protein, 27 aa, Homo sapiens
MAAAVAAAAAAALGARSRDRRREKQNL

SEQ ID NO: 74316 - protein, 51 aa, Homo sapiens
MRRSSRSFRLQCTGFPSSSAQSISAHLSNSMPSSLLTISRCPGMFAVRCPL

SEQ ID NO: 74317 - protein, 47 aa, Homo sapiens
MSRAFMRVLMIGKSILRMWSPYVTALLSILSSVSGASLQNVKQRSTH

SEQ ID NO: 74318 - protein, 61 aa, Homo sapiens
MPRPASARARCAHTLACAHCLALPSEMNPVPQMEMQKSPVFCVAHAGSCRPELFLFGHLGS

SEQ ID NO: 74319 - protein, 45 aa, Homo sapiens
MGNAAWAASASIPRMAWPATLPTTAAGSPRTWLRNSAIYTTRSIT

SEQ ID NO: 74320 - protein, 68 aa, Homo sapiens
MLCVFLFLYFVSSTKLAEKNAFVYFSCWVVRRKGREAKGLPLRRCSARSRPHVPPPPEKRAPVHLGSL

SEQ ID NO: 74321 - protein, 102 aa, Homo sapiens
MTSLCVVHHFSPNRGFFFSSATLIFPHFIPPSLPPPSLPKRAPLRPSLGPSAQPCSPRSARGSQSGDGRTWLERLGGRRGGDPRTPGSRTWSRSSREQNGVS

SEQ ID NO: 74322 - protein, 88 aa, Homo sapiens
MGFLCLPRSSMRSSTVGILTLSSLQKKRILFIPSLVWLLLQTQRDQRRLKKVEKLRHKKRAVKMWATSLKPRRRMKKKERQPQKRRKK

SEQ ID NO: 74323 - protein, 55 aa, Homo sapiens
MHPQEGHALRSPPRRWLLLTWCLGPWHSGGARGQGAGTWGPTWSCPATRSSSCCS

SEQ ID NO: 74324 - protein, 29 aa, Homo sapiens
MGLFLPAPISLTPGSVRHSPASCGNHLKF

SEQ ID NO: 74325 - protein, 77 aa, Homo sapiens
MRPSPLSGILADPLFLFPFSEGLPRRRAASRSRLQTPSARCSPRPDAEVAASQKLGPLHPPSEKGAMLISGSTKGPS

SEQ ID NO: 74326 - protein, 25 aa, Homo sapiens
MIISAPCHLSCTSFLMRSLCLQFQE

SEQ ID NO: 74327 - protein, 22 aa, Homo sapiens
MRLGLPGAAAARPASSFPAVGN

SEQ ID NO: 74328 - protein, 28 aa, Homo sapiens
MCLWVLICPAIFTSNQEVELPLVFLLGT

SEQ ID NO: 74329 - protein, 84 aa, Homo sapiens
MVLRRAQLRPSLSEGQHPASRNPAFSGSTTAFSFPALSLSSPSSSFSSSSSSCSPPLPVLPSRTPGDRRSSLTPLKRQQQSPYP

SEQ ID NO: 74330 - protein, 52 aa, Homo sapiens
MAPGHKPRSAPVRAVPRPRGAGFGGTASPLSLAKPVSLQSCGCSFPYVCNRL

SEQ ID NO: 74331 - protein, 37 aa, Homo sapiens
MKNLLSSFFLTFSCEIQKGHIVSGHSKKERKKKKKGI

SEQ ID NO: 74332 - protein, 25 aa, Homo sapiens
MKWFPSMATLVQISPTLKSSSSWKA

SEQ ID NO: 74333 - protein, 51 aa, Homo sapiens
MVAGAAAAAAAQPSVRCCSLRGVLQRTSPIYFCSRLGLSMCLLPPARGFDI

SEQ ID NO: 74334 - protein, 122 aa, Homo sapiens
MPVPACWISSSLSLLASHHSVSCSNIFLNFNPDHIRVQAQVYFTQESSILSSTLWNFCLLPQQRFCGREYVQAGWPCWLLQFFSQTYMHPMKTAGKPWLLRYPSLLEQQILSTYQMTPQSPS

SEQ ID NO: 74335 - protein, 59 aa, Homo sapiens
MASKILQKRFMAASLPVVSAFSEIRWNLALLLRLECSGMTLAHCNLTSRVQAILPQPLE

SEQ ID NO: 74336 - protein, 40 aa, Homo sapiens [sequence omitted]

SEQ ID NO: 74337 - protein, 54 aa, Homo sapiens
MSSSAFRWRHFIWIPQLSSICYLQLSCHLHPCLPSCRLWTVVPQPAPWIPSSPS

SEQ ID NO: 74338 - protein, 84 aa, Homo sapiens
MIRSFWFYGKTLALLPSLERNSSVVSVALRLWSLGTGWSAVRSVAMLITRTAMFPGLQPLERERAHPGYAASVSLRSPPRGEVP

SEQ ID NO: 74339 - protein, 62 aa, Homo sapiens
MLKYRFPAGTMALSSVAQWSSSEDAKLVESMDMKPTDIEGWPGAVAHACNPSTLGGQGGWIT

SEQ ID NO: 74340 - protein, 72 aa, Homo sapiens [sequence omitted]

SEQ ID NO: 74341 - protein, 82 aa, Homo sapiens [sequence omitted]

SEQ ID NO: 74342 - protein, 36 aa, Homo sapiens
MRLRQSYMQKLKMPGRFLVSFTTYPAFLHRCQIWMI

SEQ ID NO: 74343 - protein, 31 aa, Homo sapiens
MGRASVSPAVTTGTVSTSQSAWPRNRKEGSQ

SEQ ID NO: 74344 - protein, 60 aa, Homo sapiens
MLLRPQRPLQVPAPAAVPRAVPSAGPAAPPAARPWPPDGREGSGSPRKFQVIQHLFNQKY

SEQ ID NO: 74345 - protein, 72 aa, Homo sapiens
MLLRPQRPLQVPAPAAVPRAVPSAGPAAPPAARPWPPDGREGSGSPRKFQYAFLETRYTKTRSLLSRSSQSD

SEQ ID NO: 74346 - protein, 36 aa, Homo sapiens
MSRARRKSRIAPGRRRSPAAGGILPLTATLVVLCGC

SEQ ID NO: 74347 - protein, 93 aa, Homo sapiens
MRGRRGRAAPPVLPPLPPQGRAGRVQPGGGLGSPPGRRVLAAPCPARPAASAAALPAHGLGCQDVQLRRRLQDAAQGVPWRREQEVFHPKKCI

SEQ ID NO: 74348 - protein, 31 aa, Homo sapiens
MYLVTCFQAGSLSGPLAWGKPPHLLRVLFRV

SEQ ID NO: 74349 - protein, 35 aa, Homo sapiens
MTMRLTCSLTVLLGLSWKEKTQIHLRIWKQMKTPF

SEQ ID NO: 74350 - protein, 67 aa, Homo sapiens
MRRRWRTGYKARPGARISPLAAATAIRRTCSASSWAPGKGQVSPRTEPPPAALSSRSWPSRSSTPFK

SEQ ID NO: 74351 - protein, 78 aa, Homo sapiens
MRWTLGSANRAFCGLCGESWRRRLPVAGLGAAPVGGLLPGPAAQPSRRLGGHSQAGLRGSGSVDPSRQNSRSAAAFKT

SEQ ID NO: 74352 - protein, 62 aa, Homo sapiens [sequence omitted]

SEQ ID NO: 74353 - protein, 50 aa, Homo sapiens
MTSSVHLLVFKDHLLSMLSCCQGACCPSTPHEGTRSTVSWIPPTYKAATH

SEQ ID NO: 74354 - protein, 26 aa, Homo sapiens
MFAVWRALSLAVETSVTLGRVYFFDG

SEQ ID NO: 74355 - protein, 109 aa, Homo sapiens
MAVPCGAPTSWPLLSTVACARAPRSCKLQSPGNRWAVRPAGAGRSRAPRSGCALPGGAGRLWAAGKRSGGEGGRRRRVREEKAPALAAPLAPLSWDVPQWHRLLSFLLS

SEQ ID NO: 74356 - protein, 57 aa, Homo sapiens [sequence omitted]

SEQ ID NO: 74357 - protein, 194 aa, Homo sapiens [sequence omitted]

SEQ ID NO: 74358 - protein, 55 aa, Homo sapiens
MRHRLVSLSVTSCVTPAAGTRRGSAGAVGTNTGRGGPPPHALRASGEQSPAQGVS

SEQ ID NO: 74359 - protein, 148 aa, Homo sapiens
MPRSAPRAAAAPARAPAAAAVACACCPNSAPDFFMVCGGHVRSLAGKRLFSSPPRPACSGPNDLRSSGVSGGAVRPAARTRRRAQGEVEEEASCGEKGRRTAERMGPVAAARAGLDAAWARRCEVPKVTTIPTRQPRAPARPGAPRRI

SEQ ID NO: 74360 - protein, 150 aa, Homo sapiens
MKGARIPHHLAQVEAPATLGEAAAHSRAAVAVAAMVTTTMAAAVVAAAVAAAVAAAVAAAVVAAVATVVAAEVTAAVSPPGDPAPAPPPATTVGAAEEMDINPGVKSQGMKPAGAGNLGFRTLRRLLGCLTLTLSGRILNPSWVSSTGMP

SEQ ID NO: 74361 - protein, 59 aa, Homo sapiens
MPAAWPGAAAPWRCSLASASSGCAQGCGVRIQRSGWWSISWILPATTSLSAQPPMALSW

SEQ ID NO: 74362 - protein, 79 aa, Homo sapiens
MDLWCSVVQLLCPPLPADQLCQHANPRGHCHRPLLCCPVPHGVPHEDHREPGCDGTCLHLASLAHRLPATPVWLVIRGV

SEQ ID NO: 74363 - protein, 56 aa, Homo sapiens [sequence omitted]

SEQ ID NO: 74364 - protein, 32 aa, Homo sapiens
MVVVRLSPVLRMPIGMGEACLACGASQWPSSH

SEQ ID NO: 74365 - protein, 72 aa, Homo sapiens [sequence omitted]

SEQ ID NO: 74366 - protein, 34 aa, Homo sapiens
MIQKREPGMLCSSLPVGSGEAGGVAGLDGRHENS

SEQ ID NO: 74367 - protein, 29 aa, Homo sapiens
MSERRVGRAAAAAAAAAWSAVAGPGRLSS

SEQ ID NO: 74368 - protein, 43 aa, Homo sapiens
MGCFLLASGMGAFASEDLQCHNKHMPALFYREPWRSWDRGHID

SEQ ID NO: 74369 - protein, 82 aa, Homo sapiens
MHSKRQTITRHSASLSFHALPRSAFLQLCLLRQIHQIPCLSIFSSTLRAQTHDSGIGCTTAKPRRETAGAAQMKKLKPTEMK

SEQ ID NO: 74370 - protein, 30 aa, Homo sapiens
MKSIQASLISTLRARSAELIRRAVVPRARG

SEQ ID NO: 74371 - protein, 49 aa, Homo sapiens
MCVALILNFGGILLCEADRHCKGPRVACLSLEMELNQIKSFHWRLVLTL

SEQ ID NO: 74372 - protein, 64 aa, Homo sapiens
MTSWASRGTLEAVSAGRMRRRRRRRKQARRPRRRRARQARLTTGATSGRRPQEPAAGGDSTAEL

SEQ ID NO: 74373 - protein, 25 aa, Homo sapiens
ITSKSSVIFLLTSLKSALKRTATDD

SEQ ID NO: 74374 - protein, 35 aa, Homo sapiens
LWKTDPLDKRHVWGKRGFLMLFWMFPKSTAAALPP

SEQ ID NO: 74375 - protein, 43 aa, Homo sapiens
MAPSALMKMRRKRRRKKRKKKRKKLKPVMWSWSLSFHRDYEGL

SEQ ID NO: 74376 - protein, 29 aa, Homo sapiens
MMRFVLQTGKKQGLCPLLTPSHSAFTVGS

SEQ ID NO: 74377 - protein, 63 aa, Homo sapiens
MKPRLGSIFFYRRICSLVLFIATQVQRVNLTSFIFQGMLLLLVCERILFCSLIMLNYVKLPLL

SEQ ID NO: 74378 - protein, 29 aa, Homo sapiens
MFGQLAVSLLSCCQECLCGQENRMWISCI

SEQ ID NO: 74379 - protein, 52 aa, Homo sapiens
MRESVSVFPVWIAMRTSTQSDCRPSSQHLRVFETFEVVVCRLGWELFQFSLG

SEQ ID NO: 74380 - protein, 40 aa, Homo sapiens
MQCSGANLAHCSLCLLCSSDSSSASASRVAGITGAVTDEN

SEQ ID NO: 74381 - protein, 36 aa, Homo sapiens
MASPGELKMSFHICKSGCVGTVLNLWIQGSMNTESA

SEQ ID NO: 74382 - protein, 39 aa, Homo sapiens
MPQLTTSSLLVPSLQCPGCHLLPLWVPGILPHRLPKAPF

SEQ ID NO: 74383 - protein, 47 aa, Homo sapiens
MPESTPSGRQKSLTSAAMCLALCAKGQVRREQDRTSAALWNSAGRSW

SEQ ID NO: 74384 - protein, 82 aa, Homo sapiens
MSFVAPEVVVLRKCLLAAVCMGACACAHTHRGLLYRCKGAALRPARLLAVGSPLLLLSGLCRVSRSVLGGAGGQGQSGSVRM

SEQ ID NO: 74385 - protein, 44 aa, Homo sapiens
MAPGGPSMPWVRSACPVCAMSVPGPFLPWAGPQEEPVGVERGLR

SEQ ID NO: 74386 - protein, 82 aa, Homo sapiens
LSDRAPRRRQRRRRERDRKGRSAPAPLTPTAAAAAAAAAGRSGAGRAGGGAGAAEPGVTSTQRRQSARPPSPRGAAAGRRGI

SEQ ID NO: 74387 - protein, 36 aa, Homo sapiens
VAQSKDCMCSLLCCILSSLTTVPSTQRALPVYLLSK

SEQ ID NO: 74388 - protein, 55 aa, Homo sapiens
LLMFLLRSSSSFPALLLPLQISPPSASDWIKGNHFSKGSLALSFQAILQPPEPST

SEQ ID NO: 74389 - protein, 73 aa, Homo sapiens
VTAPGSATLPAAATAAAAAAAAAAAALGSPRVSGTALSTVSGAASPTLHPPRPPHPLPHPCALMWSLREQNRP

SEQ ID NO: 74390 - protein, 82 aa, Homo sapiens
LELMSRPAAAAAAAAAALSFVSRAVWARAGVPGTPPPPSFPQDSSLLALGPNGARLPGGRSAHRARLPLLLPDHLVSTRNEI

SEQ ID NO: 74391 - protein, 81 aa, Homo sapiens
MSRPAAAAAAAAAALSFVSRAVWARAGVPGTPPPPSFPQDSSLLALGPNGARLPGGRSAHRARLPLLLPDHLVSTRVCLHY

SEQ ID NO: 74392 - protein, 67 aa, Homo sapiens [sequence omitted]

SEQ ID NO: 74393 - protein, 29 aa, Homo sapiens
VCVCVCVCVCVCVCVRPAMTTRRNKWDGE

SEQ ID NO: 74394 - protein, 58 aa, Homo sapiens
MVCISVAMTTQQQLAWASYQSTNVLLTRCLSDFARQFSLLDSHKRFRRLLTAFRGETG

SEQ ID NO: 74395 - protein, 28 aa, Homo sapiens
LVKPLPTLTFIIVAPSLPSSVPQISNKR

SEQ ID NO: 74396 - protein, 47 aa, Homo sapiens
LHMKRKSCVCVFILAGSSTRREGSGFRAGLKTSHQSGDNSVEANSFS

SEQ ID NO: 74397 - protein, 41 aa, Homo sapiens
MCAATIGPLPQAACEPLSLSALAQAAPIFVSLPRLIHPGFI

SEQ ID NO: 74398 - protein, 87 aa, Homo sapiens
VCGFFFFFFLLPACPDFRKERRSFASSVAGSALQCLMFTEILIVVSLPQDFIVWKMPSPSNLSSRPGSPKVTNFNGALKLNRNHPSH

SEQ ID NO: 74399 - protein, 147 aa, Homo sapiens
VGVSSPLSLLPSLARTLAVSSLCRDCQSVRLQRGGDGRLCHGFMRAGTGRRTCRRRGEETWSRPLALWGRVGQSVGEAGGGDRTGWGWTPGFWERAGSPDARVPKVSGVAISPDPPRGRSAGQRGGGWGEAWPERCWKRSRDLWGPR

SEQ ID NO: 74400 - protein, 132 aa, Homo sapiens
MLLRMSEHRNEALGNYLEMRLKSSFLRGLGSWKSNPLRLGGWTILLTLTMGQGEPGGPQGDPWVPHELLLPSLCDSSHASSWGSGSITCAWRGGDSSSHPLVSGHILSNSPVAAVMCSSMGTHLSPFKGTLL

SEQ ID NO: 74401 - protein, 38 aa, Homo sapiens
MSEVATLLFSQTALASLESVHPAGHKLWMRNLRQVTSP

SEQ ID NO: 74402 - protein, 23 aa, Homo sapiens
LFFLLLLLFLLLLVVVVVVVLNF

SEQ ID NO: 74403 - protein, 123 aa, Homo sapiens
LGLLSLSGSIFSAAGGRGLLWGAQPVSQVSLQCRGEPPGEPGAGGRRAGVGAEGAAAPASLGGEVTRRGEGRSREGASGPPPSYGRTATGAAPSRRGPGGPGIGEWGAWGPWRASRWRRPRWG

SEQ ID NO: 74404 - protein, 63 aa, Homo sapiens
MMAQKSKFRVLFMSDPHGTAMPLTSAILESSRASLAAKQEDKCFTDIRNLKWKHFLEHTKQPP

SEQ ID NO: 74405 - protein, 66 aa, Homo sapiens
MNLNPRLRLQVISFHPHPKALAVTLLPALTQSLCLCMASCVYSGPKGFLFLFFPQTAQEKHMKNIT

SEQ ID NO: 74406 - protein, 23 aa, Homo sapiens
VRALTAILWKPPSSLAQASVVAP

SEQ ID NO: 74407 - protein, 39 aa, Homo sapiens
MAARSSSGVAAAEGAAALAAAETAAVTVAAAARDLGLGE

SEQ ID NO: 74408 - protein, 28 aa, Homo sapiens
LMPNWRPFSCLLPPLILAFPGVLPSPEL

SEQ ID NO: 74409 - protein, 23 aa, Homo sapiens
LARVEDQGTEQKSPWWPECQVSS

SEQ ID NO: 74410 - protein, 49 aa, Homo sapiens
LRLLLCVLSMSPSQLPMPSSYPSCTLYSCHVTAFFKNIFDRNQVPSEAL

SEQ ID NO: 74411 - protein, 35 aa, Homo sapiens
LEAGAITAAVWAQAMCSSGALGTAVARAWGQPVQS

SEQ ID NO: 74412 - protein, 82 aa, Homo sapiens
VVGSGWKLRYGKSFLCSLAPSPPPWFSSAAVGGEHPETRAAVAAASPRLGGRAAGQVLSAPRASLAASLLCPAAAVHMGCWR

SEQ ID NO: 74413 - protein, 63 aa, Homo sapiens
LGSGGGWLAVAGSFAMGSRSFALSRPVLLPGSPQPLSEESTRRRGLQSRRLLPAWAAAPLGRC

SEQ ID NO: 74414 - protein, 54 aa, Homo sapiens
MLPGLRAVAPGAEGGAGAAEAGKPRTGLLAGHSALHGRSVNGDYSSIYRELAVG

SEQ ID NO: 74415 - protein, 41 aa, Homo sapiens
VSPSTSASAPAATRAPSAAAALLLLKAAAAPWAKRFSNGTF

SEQ ID NO: 74416 - protein, 37 aa, Homo sapiens
MWTAVLQCQVITLIMYLLGSGAVSSTLLLTCTTLFST

SEQ ID NO: 74417 - protein, 77 aa, Homo sapiens
KTVTFLSGQLSGALVSFLLCHKVRVLETQLSLEMRVGIAVVIMTPLRRGHHVGSLCWALIDGSPARPDLGCRSPAGF

SEQ ID NO: 74418 - protein, 59 aa, Homo sapiens
IFPSEAFSPQCLCMFLAAFPLEYISTVAFEAGLLECTPELRIHSNFLDDSQWRKPDAMS

SEQ ID NO: 74419 - protein, 46 aa, Homo sapiens
KPTVLGFLACGISLVGLHTKPCRSAAFPDSPVLSECKGLPCRRCVL

SEQ ID NO: 74420 - protein, 32 aa, Homo sapiens
LAQCPSPLLAFCCSSTFLCIEGLTLGWEDDKT

SEQ ID NO: 74421 - protein, 63 aa, Homo sapiens
MCSSGVPSPPASHCPCLPKTSSLSLLCPPPPPSAFALLSSFSPEVRAASSPLVLFLPSLCSLL

SEQ ID NO: 74422 - protein, 71 aa, Homo sapiens
LTSRTQKLITTCLSRWLQKEMKKVFLLLLLTCQDCGRRMTSRGQNACCSRRRGWAAGSLSQPQMLSEGTPS

SEQ ID NO: 74423 - protein, 29 aa, Homo sapiens
KAAAMARARAVAAVAGGGGASSSSPRRRR

SEQ ID NO: 74424 - protein, 35 aa, Homo sapiens
KSLISSLFLLQDPEALSLSPWSSAGPWPCWGAPWA

SEQ ID NO: 74425 - protein, 63 aa, Homo sapiens
MALRCGTHWLPTKAPIRRLPHCKTTWLSLCTAMSPLTTEIWALRRGNSSASWSRAASGGRRSP

SEQ ID NO: 74426 - protein, 84 aa, Homo sapiens
LNARPALDLTDTRLDRLLHIRPRNGPLEKGFFKPAALSSVLASGIAFPGNLASDIAHHPALFTVPGSSWRNDISENADSYVHVI

SEQ ID NO: 74427 - protein, 44 aa, Homo sapiens
VAHHRRGGRRSSLIVPGAVTTVGPSAQSAQPLSVLPNPHNRPRL

SEQ ID NO: 74428 - protein, 103 aa, Homo sapiens
MRRKRHPWKMTRIMSRHPPMTRKLCRTPSCLPSLSPTPTPCTSTGPPLGKPPSSLLCPPRDRWPPSRPHQPAGITRHCPHPRPTTKNPAEAETTKRQSSLLLQ

SEQ ID NO: 74429 - protein, 29 aa, Homo sapiens
KVKTLKDRHFWQSSVFCAWTLWAHPGHGG

SEQ ID NO: 74430 - protein, 40 aa, Homo sapiens
VVQPVKTMVPPLLCLSPLSPSRASVQIDHHQNLCGFLTFE

SEQ ID NO: 74431 - protein, 53 aa, Homo sapiens
VQRGAAAGRPSRAHFATLTVPAVAVEVGTAAASSPLVTAQARTPAEPLGCALP

SEQ ID NO: 74432 - protein, 38 aa, Homo sapiens
MSLFSTCLSVFQSLELPSPHDCVPTELLSVLIPLPTSA

SEQ ID NO: 74433 - protein, 28 aa, Homo sapiens
LSFSLSLSLCPFLLDRSTVIHRNKHTRT

SEQ ID NO: 74434 - protein, 52 aa, Homo sapiens
LRTEVRFVTAILRGGLLVPPDLGFSAVSAFLSPSQRCLMVKLKVNSWDLEKK

SEQ ID NO: 74435 - protein, 36 aa, Homo sapiens
VRFVTAILRGGLLVPPDLGFSAVSAFLSPSQRFVSS

SEQ ID NO: 74436 - protein, 69 aa, Homo sapiens
MMKLQLPLQLSSVWILRATTYTGRIKVRRWSFWISPASGILALGSLPRCPRARSSGTSSTWTFLITVSC

SEQ ID NO: 74437 - protein, 52 aa, Homo sapiens
RGLKMGHFLSSPSCSVSALGPAISCCPWASASCCWSSSVWLDSKIPNFRGTW

SEQ ID NO: 74438 - protein, 50 aa, Homo sapiens
TPATPAALRTVLAVAAAAPVSRWARTQPLGAVAFPASQRQKRGSGTQKVA

SEQ ID NO: 74439 - protein, 42 aa, Homo sapiens
MRPPSAPPRRGCIPWQGLLLTGSWAKGTCLVSEETWDFGLYW

SEQ ID NO: 74440 - protein, 94 aa, Homo sapiens
MRAPRPPAPAPGAPGFGSILPAPVPAAARSRGQRPSGGWKRRGENTPSAVTTLTPLTVMRHLHPHQDAPNCPAAPSRAGPDRTKRSPPRFSGQT

SEQ ID NO: 74441 - protein, 23 aa, Homo sapiens
KPKCLSMSTAACQTSSIATRCPV

SEQ ID NO: 74442 - protein, 137 aa, Homo sapiens
MNRRLGSRPSPPLPRPSPFAPPAPSSPLSFLLGLCWGLEGSGLRSEPACGGGARPSRHPQRPAILGSAAAAGVWARSLRAPRRPLAPDSFFFFFGGIFFFPRGGLAASNKLGEREGENAKSRFLSTSAPPTPVLSKK

SEQ ID NO: 74443 - protein, 89 aa, Homo sapiens
MARPPACSCAWTPRSRFGCSSACTGPSRRSASSAPLSWPSGVSHHSPAPLPPRQPRPVPWAAACLTPCSARAALALWVALLVGQPPIRQ

SEQ ID NO: 74444 - protein, 45 aa, Homo sapiens
MRPPGLLSVSPTSCAQFSGAAGLTSQVFPEPVPSSWAALPPRAPT

SEQ ID NO: 74445 - protein, 59 aa, Homo sapiens
LAEAREVAGRKGGLRAPPASRAPRGRSMLPTAAGFSIWGQVGAAGSRAQVVRPMRRAGG

SEQ ID NO: 74446 - protein, 51 aa, Homo sapiens
VPVFAHLSILQSLVPAAGAASPVAISAQHLCYSHVTPGDPGAGAGQGPAPS

SEQ ID NO: 74447 - protein, 32 aa, Homo sapiens
MLLCSPTITSKSSVIFLLTSLKSALKRTATDD

SEQ ID NO: 74448 - protein, 82 aa, Homo sapiens
LVLHPSRHSAVSCLGVAAAMARKALPPTHLGQSWFCSCCRDTELAISALRARTATGSPGSCRCTAGPLPCASALESCCCRVT

SEQ ID NO: 74449 - protein, 52 aa, Homo sapiens
MLDRFVLSLSSSIAGSQELFGKFVAMHESGDWFFFHWKLLMGTALAAPYRFA

SEQ ID NO: 74450 - protein, 38 aa, Homo sapiens
MKSKRHVEAIITIHIPLIPAAAPAGSGAEHDNSDAQWE

SEQ ID NO: 74451 - protein, 32 aa, Homo sapiens [sequence omitted]

SEQ ID NO: 74452 - protein, 27 aa, Homo sapiens
MSSSLWTTTAVSTWTASLLRSRPSTRI

SEQ ID NO: 74453 - protein, 39 aa, Homo sapiens
RLELRHRRPEPPLLCCLLLFLRAPVSARPPTLLRNLTRN

SEQ ID NO: 74454 - protein, 34 aa, Homo sapiens
RASATCMMWIGEMVCPPSHGMSLLCSGIFPSLGF

SEQ ID NO: 74455 - protein, 76 aa, Homo sapiens
MRTPGPPRRGSRRSLLPRPAPCPPTRSPWPLAASGSPALTTTSTSASWARRAAARSTCWTSPSTTTSSVARWIHTT

SEQ ID NO: 74456 - protein, 36 aa, Homo sapiens
MHGSDFPPRLCLHSMSLWGSWGSRPPSPAHSREVAS

SEQ ID NO: 74457 - protein, 30 aa, Homo sapiens
MLSHGKGRHRVAVVSGHLFSEGSAWSTIST

SEQ ID NO: 74458 - protein, 71 aa, Homo sapiens
LSLFLVPSGAFPILVLRSSRSELVRRGWELVPAEIQWEEPAAARATPPLERILKEMKSALRNEVDCLLAFC

SEQ ID NO: 74459 - protein, 37 aa, Homo sapiens
MGTQMIHEFALVSLAQVVCANHVCLHSSVLPCVLNKK

SEQ ID NO: 74460 - protein, 44 aa, Homo sapiens
LSFAAIADLLLTSIPLDPARAWILTMSRFTVYPCLFGYTSDVHF

SEQ ID NO: 74461 - protein, 31 aa, Homo sapiens
VPLPLLPPPLLLLLAPSLHQPEALCFPSWIC

SEQ ID NO: 74462 - protein, 32 aa, Homo sapiens
KQSKPGHTILPQAQLLSCLPTPWGAISAPNSA

SEQ ID NO: 74463 - protein, 71 aa, Homo sapiens
VDVAFAPTGASESSSPQDELQPPRESSARHQVTRPQPPGPQLRPASPRSGSCTLTLDSAAHGKNRIAPACN

SEQ ID NO: 74464 - protein, 33 aa, Homo sapiens
MAMFLLGLVPAGSGSCSWGHSVNRVHGQQPNIQ

SEQ ID NO: 74465 - protein, 32 aa, Homo sapiens
LAGLQVRGWPVSVPGSCGRQRQATWVQIKTKL

SEQ ID NO: 74466 - protein, 49 aa, Homo sapiens
VGTGRVAHHRRGGRRSSLIVPGAVTTVGPSAQSAQPLSVLPNPHNRPRL

SEQ ID NO: 74467 - protein, 29 aa, Homo sapiens
MRALFLIISLLGKNRMNQPCPMLGSWRQE

SEQ ID NO: 74468 - protein, 64 aa, Homo sapiens
LESRVFPGDQAPLQATLFSRGVKEQKALGAALGAGFRTLPFLALCTSLSPFGAGGAGSGVTKEL

SEQ ID NO: 74469 - protein, 166 aa, Homo sapiens
VRDWAYATTGARCLSLSVCGSVLVVLPSSFGICSALVCPRPPQAPMIKSSSLTRACPPHPRQQGGEWGNKITTKSLGVSHSPSPGTLSETLQSPRNSLREAGRRPAIWTKLRYADADRAALRGEDPGGASSAGSSSQKTDDPERVAGTDCQAFGGRRGQSFAGSES

SEQ ID NO: 74470 - protein, 77 aa, Homo sapiens
LQDLVWSGRRRDMSSLWALILVGIFIHQVHKCNFKPSATFSKLFLHLLQSYSDGKNFLCFSSLIYYFFKLQEQCILL

SEQ ID NO: 74471 - protein, 24 aa, Homo sapiens
MQEMVLLVAATGLRSPLVRDGSDL

SEQ ID NO: 74472 - protein, 47 aa, Homo sapiens
LWRLCGAAALAGVGSWCEVRGAVVAPRRGQVSVGRRRVPEVTGSWFF

SEQ ID NO: 74473 - protein, 26 aa, Homo sapiens
MCVCLYLHMCLCVCVCVCARACALVA

SEQ ID NO: 74474 - protein, 25 aa, Homo sapiens
LPRLFTIIFGLFLFPGYIFSLARST

SEQ ID NO: 74475 - protein, 57 aa, Homo sapiens
MLRSNTLAICMLHAICWQFLSDIKMKQYSWTEDTEFLIPVGLVLFSVSYNCTWRNRY

SEQ ID NO: 74476 - protein, 31 aa, Homo sapiens
LLGPTGLVLLTQPARLCSAHTTCLDPMSAKG

SEQ ID NO: 74477 - protein, 64 aa, Homo sapiens
VEPPASPCPGGWKCKRKVSARSFFSESSLLGLQMAACSWHSLFSTHAQSYGGPSNHLLQPLKTS

SEQ ID NO: 74478 - protein, 48 aa, Homo sapiens
MAKAQSQHLLCAGSMLQAADLSGIKHMTPVEAEATPSWKLTCHIDLTE

SEQ ID NO: 74479 - protein, 92 aa, Homo sapiens
VAGACTLSFAGLLSQSELPAGPPLQPLSFLELCADWCVSTPGPLPMLLMVSFLCTLVVATVNADKIADADCLPSCECWHGTSSPDGHWKWLG

SEQ ID NO: 74480 - protein, 164 aa, Homo sapiens
MWGCDCYSTFRRRVSALLLRLRLALSPAWPRGMPPGRSADVTAMLCTSSSPSPLHFLCGAHLLLRQGACAAGRPDSSQPAPPPRLRPPLPPRRVCTTAEARRANAGSPELGVEIKQTMTFPFPAGHSQVKTHLRTTSVVSDPCSPPHPQASAVNLNVLFQDFSP

SEQ ID NO: 74481 - protein, 38 aa, Homo sapiens
MTVLVSALWSISRRSLAAELSQWKLVRGTQMRNGPRPS

SEQ ID NO: 74482 - protein, 67 aa, Homo sapiens [sequence omitted]

SEQ ID NO: 74483 - protein, 72 aa, Homo sapiens
MSPPRLSSSLGAHLPCIVPSPVLDCIRPRLLRKGKGMPLRRLGAPHRTPQRSQMGEAELRGRCPHSGGETWL

SEQ ID NO: 74484 - protein, 59 aa, Homo sapiens
MCGRTWLLTRVVTGVAAAEDSHPFFVSAERRLHGPSSLQLFHLLPCVEPGFCTESEMPF

SEQ ID NO: 74485 - protein, 39 aa, Homo sapiens
MGSPWKLLSGGGTCSPGLTPSCIGESEPGRDRAVGESLR

SEQ ID NO: 74486 - protein, 70 aa, Homo sapiens
MKLQEGHTVLLSLPLRLAGTETAEHGGPSYPFTDSALRAGEDGPDLPRALAAPRAPRAHPAGLCGAAAQP

SEQ ID NO: 74487 - protein, 138 aa, Homo sapiens
MSSWSPRRAGGPTRPCTALQALSIPARCTPSRKPWPCWSPMRGCPRTSMWLGPLRSWLVPSSSTPFSLGPMGTCTAWCEAATVSLSLRLPCSSARWPPPWRTVTSTVWSCVISSCVALSSLTVRGRSWCWRTWRTPAC

SEQ ID NO: 74488 - protein, 37 aa, Homo sapiens
MLHGDMLLSLPSAPATWIVSSPSSSFSAALFSTASGN

SEQ ID NO: 74489 - protein, 60 aa, Homo sapiens
MQAQPLGVAAPASLAQVPWLTWTAQALPRAQEVLRTKWCLQEKCLAALSKPWRKTLVPIP

SEQ ID NO: 74490 - protein, 130 aa, Homo sapiens
MGDLDNSAFAAWAPFCSSSTRALSAPGHWGFEGRQFPAAPARLGGRRPRVPVGGRPRQPAKTSRHRNLRRLPPMRASGAPSLPGGRGEGRVAPGGGLRATGLRCASVDTAPPSASTALGSGTFGNRFGRS

SEQ ID NO: 74491 - protein, 40 aa, Homo sapiens
MTSWHPALLHICPTGVAVAPSCKAMLKKLWKQEGSMDSKN

SEQ ID NO: 74492 - protein, 114 aa, Homo sapiens
MRLKSSFLRGLGSWKSNPLRLGGWTILLTLTMGQGEPGGPQGDPWVPHELLLPSLCDSSHASSWGSGSITCAWRGGDSSSHPLVSGHILSNSPVAAVMCSSMGTHLSPFKGTLL

SEQ ID NO: 74493 - protein, 27 aa, Homo sapiens
MRRQEETTGTHIAGMQMGSVLLTLAMG

SEQ ID NO: 74494 - protein, 30 aa, Homo sapiens
MRPYRGLTLLAGFPSSRGRGLCFYFRIPQL

SEQ ID NO: 74495 - protein, 39 aa, Homo sapiens
LATLLPSLCIFAVPPYTSFLTAVLISCRKIFSFHFLQGG

SEQ ID NO: 74496 - protein, 23 aa, Homo sapiens
MPLRSGITPLLSAAWATVLILCW

SEQ ID NO: 74497 - protein, 34 aa, Homo sapiens
MSSSQAAASLWVTSMRHPLPPTWTSTCTSCAPIT

SEQ ID NO: 74498 - protein, 76 aa, Homo sapiens
VMATSLRLHLLPSLCSFESGSPPSILAGSHSVTPGWSAVAGWQLTAASTTLAQAILPPQPKRNSWNGKPNTTYPQL

SEQ ID NO: 74499 - protein, 38 aa, Homo sapiens
MCGKGMGMCGLGAGAPTHSGGQAVSRTTCCKAREGRRR

SEQ ID NO: 74500 - protein, 31 aa, Homo sapiens
MCWFTPVILALREAEAGGLLEPRSLRPAWAT

SEQ ID NO: 74501 - protein, 103 aa, Homo sapiens
LAGRRIAHSGGAAVFVGWGSGLQLAAGIRAQPGCKFSPVALSAHSQALCMSDTSVCHGTWPCSGLAPAPEPAGGLSESCSVPRLHSERHYLPPSFNHTISWWI

SEQ ID NO: 74502 - protein, 33 aa, Homo sapiens
LLTASVGATTAAVAAAILMAGRVRFWDSWRQWW

SEQ ID NO: 74503 - protein, 28 aa, Homo sapiens
MLESFGTPLISLLLLTFIYYFSKCESNT

SEQ ID NO: 74504 - protein, 60 aa, Homo sapiens
LKQEMILLKVCSAASLLGEGFMNQVTSTNKASLSLLSLTMKVAVNKGKKERELFIPFQFQ

SEQ ID NO: 74505 - protein, 35 aa, Homo sapiens
MTVVFSLLGTLRAPAPFSSPLQGCRRSRDLVGVGG

SEQ ID NO: 74506 - protein, 33 aa, Homo sapiens
MTVVFSLLGTLRAPAPFSSPLQGCRRSRYCPRC

SEQ ID NO: 74507 - protein, 26 aa, Homo sapiens
MVAAVGDVQFFFLFPSTDAEQTCLSA

SEQ ID NO: 74508 - protein, 46 aa, Homo sapiens
MARLLISWPSLVHLHIGNGFPLIGMVSLMTPPCLTKIPSWYLSSSS

SEQ ID NO: 74509 - protein, 74 aa, Homo sapiens
MPRRSSSGSIVCSLTMTGLLSLGALLPALFTAITWKVDVIFGPCHFRSRTTFNWHKYPNTESCSNNKCSSKLGI

SEQ ID NO: 74510 - protein, 62 aa, Homo sapiens
VENLLNFNFSVRIVISRSVFTTSRYTAPNTAHPQLPMHIFPVGETRREMSISVPVPNSPERF

SEQ ID NO: 74511 - protein, 32 aa, Homo sapiens
MNFFHLLWRQFSFSSVIPSCYSVPSHPVFLGK

SEQ ID NO: 74512 - protein, 39 aa, Homo sapiens
MGDVLLSCIQILPTKAITIKKHKNLSMLAVIFECLWLSE

SEQ ID NO: 74513 - protein, 42 aa, Homo sapiens
LAQGRRLHHISDTSLSFSPLLLPPAHIASPLPPPSPAGLLAS

SEQ ID NO: 74514 - protein, 26 aa, Homo sapiens
MALLDLLMLSLIKTLQHFSQAVFTHY

SEQ ID NO: 74515 - protein, 38 aa, Homo sapiens
LHSLWRLFRRICSLLCQFLMAAGSPWHVAASLLSLLSL

SEQ ID NO: 74516 - protein, 10 aa, Homo sapiens
IWMLVIGVQY

SEQ ID NO: 74517 - protein, 12 aa, Homo sapiens
LFCLFVFCFFLS

SEQ ID NO: 74518 - protein, 47 aa, Homo sapiens
IGLKRRTEPHTADGPELAERRLPWLLLTVSTSCTGKSPGLAIAIWKL

SEQ ID NO: 74519 - protein, 50 aa, Homo sapiens
MAGACPLCPAAACRAGSHPTSPSPSRHPRKRPRPLASRTACCLRVFRIGG

SEQ ID NO: 74520 - protein, 37 aa, Homo sapiens
MNMKKCPMSLLATLFCGSSHWWCLGSPLSSGSWAMGL

SEQ ID NO: 74521 - protein, 117 aa, Homo sapiens
MGAFLLATSLKWNLLVALLPLQLWCYTEKLEETGFHYVAQSGPKLLVSSSPPISAFQSARIIGMSHYIQLLLVSSDSCFDTTDLSFKTDKGKRETSESLIKVEASYFYQRIHCAWTL

SEQ ID NO: 74522 - protein, 60 aa, Homo sapiens
MRRSWRRAWGWMVPSQPRSLLAAPPGSCRRSVRRMSPRRGGSRGPRPGRRMALWNCQPRA

SEQ ID NO: 74523 - protein, 120 aa, Homo sapiens
TARSWSEASRAERARRWGREDAQVAALPCRTVTATAGVAAAAPPNGRSRPSSAAWPTACTCASTWSGCNALTRAARAAAAASSSRGRSGPTAPSLLKVMQMKSFCLIFHLRAMSSSKASL

SEQ ID NO: 74524 - protein, 10 aa, Homo sapiens
LITFQFCFVF

SEQ ID NO: 74525 - protein, 29 aa, Homo sapiens
LCTFSFPSCLFFFVVLYSCCLSTMCQTLC

SEQ ID NO: 74526 - protein, 16 aa, Homo sapiens
IKYWSKKLVTFLYMVR

SEQ ID NO: 74527 - protein, 20 aa, Homo sapiens
LTKVPWSFMSQHILLFLFLQ

SEQ ID NO: 74528 - protein, 11 aa, Homo sapiens
MFIVMLLIMHC

SEQ ID NO: 74529 - protein, 27 aa, Homo sapiens
LDFQWQLQWPFMWLAVSLVVTSTQLCL

SEQ ID NO: 74530 - protein, 87 aa, Homo sapiens
VAGLCLSLLSPGWAPGVRSSRRASWAYSEIGHQPPFLLQTWSEPVFPPWDLKTVPSACTVDHSRATGQPVMVPRRSAVDPALWAALS

SEQ ID NO: 74531 - protein, 26 aa, Homo sapiens
LERGLLKITAAAFGLGSVLSACARTG

SEQ ID NO: 74532 - protein, 8 aa, Homo sapiens
KWLCWGLL

SEQ ID NO: 74533 - protein, 16 aa, Homo sapiens
LYWVSLMPAWTILEAV

SEQ ID NO: 74534 - protein, 35 aa, Homo sapiens
THHRLAFQDTSCISDLLHLCYLGTSVILAASTCLS

SEQ ID NO: 74535 - protein, 25 aa, Homo sapiens
LKDWVFSLVFHMYCLISVLETSTIT

SEQ ID NO: 74536 - protein, 20 aa, Homo sapiens
ISKYTRLIFRSFSVLLSVVV

SEQ ID NO: 74537 - protein, 74 aa, Homo sapiens
MSFFILLFFKHQILLFFFFLPSPQIPSQIILLTTIPTGRGELKHLLPLPCFSFIFYFFASVLMFLHTLHLYSKV

SEQ ID NO: 74538 - protein, 45 aa, Homo sapiens
RRRLCGAELRRTSQLGQWLRRLPAPPLRFIWIQGWLSTVPAALSS

SEQ ID NO: 74539 - protein, 30 aa, Homo sapiens
LVLFSLFLLHSRFPPLCWSLPCYPVIKNKE

SEQ ID NO: 74540 - protein, 24 aa, Homo sapiens
LFFVVYFCIFTCGAVASPHIKYRT

SEQ ID NO: 74541 - protein, 11 aa, Homo sapiens
LLWLYRITLCL

SEQ ID NO: 74542 - protein, 55 aa, Homo sapiens
IVSQCILPSWLPTLAAKAAATCCSLHSFGKRKGTSDLPDRFLSQQTICRRNKDGC

SEQ ID NO: 74543 - protein, 18 aa, Homo sapiens
LASIAFVLVSNCMVSVDL

SEQ ID NO: 74544 - protein, 168 aa, Homo sapiens
VSFLHILWGFCTPSRWGLASSEPPLPLGFPSSGCSPYPLGAPRSQVGVFLLGTPQYVLSSLTSGAPLCFPLVCPLSLSLLVLSQVSEHPHFSGSGSPALLSLPLCAPTSVSVVSPLCASCAEGPPLSLLLCLGPLAPPCFFSPSPLSPLLSAPCLPLPFSVFAGSLGL

SEQ ID NO: 74545 - protein, 46 aa, Homo sapiens
RRNTCGVCMAALYLGHQLPLLLPHEELLGQPNWEPRCLGLVTTKAL

SEQ ID NO: 74546 - protein, 14 aa, Homo sapiens
KPIKVFLLLGAIIF

SEQ ID NO: 74547 - protein, 18 aa, Homo sapiens
IHCLSLVFYSPWLLLISR

SEQ ID NO: 74548 - protein, 45 aa, Homo sapiens
MGLTPLRPGLHPHLPTSPTTATSPLRPSTLASLIVAPSGVCQGLG

SEQ ID NO: 74549 - protein, 37 aa, Homo sapiens
IQLRLSSESSHMVALGRSLARRVMPAILLLKYLPGME

SEQ ID NO: 74550 - protein, 26 aa, Homo sapiens
IKKRPLIRRRLLVSFLGTHSGFLQSR

SEQ ID NO: 74551 - protein, 132 aa, Homo sapiens
KWPLLPAVVVQCRVRAASVASCKESLRGPKSAALLLAFASSSSRFPTVKSQRHLQRPPGPTETDPQRLARSCLLHREPPSTGEGLAGGVGRWRRRHGEVPEGRPGRCRSYVTLPLLHGPVSVRRWETRRPNP

SEQ ID NO: 74552 - protein, 33 aa, Homo sapiens [sequence omitted]

SEQ ID NO: 74553 - protein, 38 aa, Homo sapiens
MLPCGTCHGAGTAALSRPAVVAAAAAAAGPERRKYGIM

SEQ ID NO: 74554 - protein, 58 aa, Homo sapiens
LTRSQAGLMASLKLMLSAGPFVGWVSQMIPFSDWPRPMASSQRTFDWRESQMWNICHK

SEQ ID NO: 74555 - protein, 77 aa, Homo sapiens
LDFTSGFSSRRDPRAATAAAAAAASSAAEGSRTGAAIPLSGSRRSRRASRTTLAPSSGFSPGVPRAGFVGGYSAVQP

SEQ ID NO: 74556 - protein, 32 aa, Homo sapiens
MQSAKSPWKSCFPSTSWISGLLSSSSWPPLSS

SEQ ID NO: 74557 - protein, 82 aa, Homo sapiens
MVIAGLFAPILKKAERSSAGASQSAGLLPSFGARSQHLPRKSRNHGASFCWLSREAQSVLQRLRIEGCSLKLPAPGHAAGSR

SEQ ID NO: 74558 - protein, 29 aa, Homo sapiens
MILKGFLLMVAFVLSSKILFSVVCKQVFF

SEQ ID NO: 74559 - protein, 41 aa, Homo sapiens
VVCALSSLPTPALPSAAVSLPPGPPCLQEHLCARVPGPRHG

SEQ ID NO: 74560 - protein, 39 aa, Homo sapiens
IIRSDVKLASQALITTWPTPWPAPLASAARAALRPLRRS

SEQ ID NO: 74561 - protein, 56 aa, Homo sapiens
LAASVLTLVTLGRSLTLRALWHPRLKGAVILQPCWGSSLDQAMVVKNVSQGQKTTQ

SEQ ID NO: 74562 - protein, 36 aa, Homo sapiens
MFANGVALWSCVSSELHCDVVGWGPTLLPCLPVAFL

SEQ ID NO: 74563 - protein, 32 aa, Homo sapiens
MHILSLSLFLSLSLPLLPSLPPSLSFLQKCQV

SEQ ID NO: 74564 - protein, 16 aa, Homo sapiens
KISRALAELHLLAFLA

SEQ ID NO: 74565 - protein, 14 aa, Homo sapiens
VVLGVLLTIILVPG

SEQ ID NO: 74566 - protein, 90 aa, Homo sapiens
MSLEAPPPWGSQSPLPSLLSLGTLLPFPPALILLSDMAQAFLPGPCLARLAEGTLLLCTLGTRAGLALPMPPSHPHGALASSKHPPWWMD

SEQ ID NO: 74567 - protein, 16 aa, Homo sapiens
LILPVLSLPAVLVVLC

SEQ ID NO: 74568 - protein, 28 aa, Homo sapiens
MGTLGSLGVTMLHLLFICLGKSCSSHTL

SEQ ID NO: 74569 - protein, 31 aa, Homo sapiens
KLTLVLALGVMSRDGGTDGDACTCVCMGAYV

SEQ ID NO: 74570 - protein, 54 aa, Homo sapiens
LMFLLRSSSSFPALLLPLQISPPSASDWIKGNHFSKGSLALSFQAILQPPEPST

SEQ ID NO: 74571 - protein, 96 aa, Homo sapiens
TELVNSSHRPLERVPSPLVPDAVWEFRAFRLLGRRGRRHPTACLSWTSPILAPAFSRTWISVQIAARSCLCPGLRIRSPVFAVASTSTFGTLRGRL

SEQ ID NO: 74572 - protein, 56 aa, Homo sapiens
MDCHFQVASSFLKMNSSLLLFLISLRTNLSTFFRNPCKRPISLNRHWQKRHIWMPV

SEQ ID NO: 74573 - protein, 36 aa, Homo sapiens
IYHIPFLLQIFLLSPFLWDLSCYIPSELTNAFTFFP

SEQ ID NO: 74574 - protein, 15 aa, Homo sapiens
MLKFLWGSIFALAFW

SEQ ID NO: 74575 - protein, 12 aa, Homo sapiens
IWLFIQISTYLT

SEQ ID NO: 74576 - protein, 51 aa, Homo sapiens
LALWRLGGAAAAAAAAAGGPFADVLLSLNISPFENAWEVQPSVCPSTNLLC

SEQ ID NO: 74577 - protein, 39 aa, Homo sapiens
KMLGCLLVVFLCCLILGKLLCKAKNPVNTILSFTGRHYW

SEQ ID NO: 74578 - protein, 66 aa, Homo sapiens
LGRPPVGMGLSVLLPLCLLGPGRFTSGQKPLDTPGLGAAVLSVRKAGLKMRSHLTPSVCTVPSPGS

SEQ ID NO: 74579 - protein, 8 aa, Homo sapiens
LLPFLVLL

SEQ ID NO: 74580 - protein, 126 aa, Homo sapiens
LPAPNLPAPGRAAPQPTGLAARLGWDRCGACVVAPLGAGVAAAGTVLRTAEGQAAPAGLVVGAAPAAAAAAWAGEAARTAPDSSWRSGLPTWRRATWRPSVRGTSGTGRTRGCVRRTPGCGSRTGG

SEQ ID NO: 74581 - protein, 46 aa, Homo sapiens
ISANLGFWVLASFLLFVDFGVQVPQLLRAAEDLLGPHINEAATWRV

SEQ ID NO: 74582 - protein, 56 aa, Homo sapiens
ILLLILQFQRLLHSLGMTRTPSPATVAVRQLALRVCPAWSLATTCGPARMAAMSWA

SEQ ID NO: 74583 - protein, 15 aa, Homo sapiens
VFFFWFLFCFSSFKG

SEQ ID NO: 74584 - protein, 117 aa, Homo sapiens
LRRTLRGRGAAAAVVAAAAGVGAAAGPGGWSWRGGVLAVWRGGRRQGPGGAPGSRRCWTGGCSGAWAGGPAAGRPGPAGPRYDKIRTPARTTRRCRLEPLSPRTWWQAPWQGSWSTA

SEQ ID NO: 74585 - protein, 24 aa, Homo sapiens
MWWVLTLFFHKTMWVSMVAINKTP

SEQ ID NO: 74586 - protein, 20 aa, Homo sapiens
MSGAFLYSVIFCAVFLLDVS

SEQ ID NO: 74587 - protein, 62 aa, Homo sapiens
IVSQCILPSWLPTLAAKAAATCCSLHSFGKRKGTSDLPDRFLSQQTICRRWLFAFIRNKDGC

SEQ ID NO: 74588 - protein, 14 aa, Homo sapiens
LLLFCTLSFSFIFF

SEQ ID NO: 74589 - protein, 54 aa, Homo sapiens
LRRARQAFPAAGRAQRLVGLRGGGGSWSLALAWQEPSSFRKKPSGRGPASASRE

SEQ ID NO: 74590 - protein, 18 aa, Homo sapiens
LGSQIFLPLAFGSTLFSC

SEQ ID NO: 74591 - protein, 26 aa, Homo sapiens
MRSQMEKKLKVFSFFTLHGGAWLLRL

SEQ ID NO: 74592 - protein, 19 aa, Homo sapiens
VLLLLPRLLLLLHLQIGSR

SEQ ID NO: 74593 - protein, 45 aa, Homo sapiens
LSEDHRGVSLTTPNRIRPDLKLPSPLWLPSALFISSLNLLGISVS

SEQ ID NO: 74594 - protein, 31 aa, Homo sapiens
MQSSHSSILWSASLGCVATHLSFMSSSAMPR

SEQ ID NO: 74595 - protein, 24 aa, Homo sapiens
ITSNSSQTFLVATLGILRFSLACP

SEQ ID NO: 74596 - protein, 19 aa, Homo sapiens
LSVVYSINMFLAGLSGSCL

SEQ ID NO: 74597 - protein, 34 aa, Homo sapiens
MCPAARASAAARAAAAARAAGMPGRRAPGLGPRR

SEQ ID NO: 74598 - protein, 56 aa, Homo sapiens
LESSGMISAHCSFYFLASSSLSTSASQRTGITDVSHHTRPTSGPYTRLIYLEMAGN

SEQ ID NO: 74599 - protein, 52 aa, Homo sapiens
KMPVFASLLVVSCFYQISGHYPTNTIKMFEQLDFKHFRFVEWCSPSGTALSK

SEQ ID NO: 74600 - protein, 63 aa, Homo sapiens
MKTQKRKSSVPSVATGPSSRKVSAGLLWGPLICWPHRALACQRPQAVRASSPSLVPPLCQSSP

SEQ ID NO: 74601 - protein, 47 aa, Homo sapiens
ILYTPMILQRKHPSLLLPLLWQLKCICSSTLKRRKRNNLSLIPKLPH

SEQ ID NO: 74602 - protein, 12 aa, Homo sapiens
IKKFLQVMFMIC

SEQ ID NO: 74603 - protein, 89 aa, Homo sapiens
LLPGDPLSSHLLLLPLLLHRARARTPPGCRSRTAPARTTRRCRCCGTRRSRWPCPWCTRWWRRSASRATSSLCGCCAGAWGPDPRRSSS

SEQ ID NO: 74604 - protein, 55 aa, Homo sapiens
LVLAKFVILRNSAVLSSTASFCLPCSFPDVIQVAEFRCPCFGSLSLCLSFFPCSR

SEQ ID NO: 74605 - protein, 13 aa, Homo sapiens
TLLVVFVFFSAVL

SEQ ID NO: 74606 - protein, 7 aa, Homo sapiens
VWFLLGF

SEQ ID NO: 74607 - protein, 52 aa, Homo sapiens
LVRQILFFFFPRALAPCPLVAFVGARHAAGRPRTRSSPAGKYASDSSLFSNV

SEQ ID NO: 74608 - protein, 94 aa, Homo sapiens
IAAAVFPFFFCRRLLCLFSSFLALLLCSVTSPNPLPTQPAPFFFCLRCSISPSAAAATAAHSWCRCRAFTPKSFPQPMAQAALGISAQGNHIPL

SEQ ID NO: 74609 - protein, 31 aa, Homo sapiens
RCPLLASLLFSSLPPPLLCPRRLRPPPSAGV

SEQ ID NO: 74610 - protein, 15 aa, Homo sapiens
IYYGLFFCWILSCKT

SEQ ID NO: 74611 - protein, 86 aa, Homo sapiens
VPASQWPGLLRLVTPLSLTPALGARAPPPQRPAVRGPTAARAPAPRTVPGRLAPWRPPAAPGDPCCCYCCCCCSASCIVRQQQCLW

SEQ ID NO: 74612 - protein, 18 aa, Homo sapiens
VRPPWLWRSLLSGSFCLS

SEQ ID NO: 74613 - protein, 13 aa, Homo sapiens
MYVSPGLFFFFFF

SEQ ID NO: 74614 - protein, 35 aa, Homo sapiens
LTIFFLPLATSLPTCFLSTLVQLFLQRPRSSELHI

SEQ ID NO: 74615 - protein, 54 aa, Homo sapiens
LALLQGSCWQLPIGLFWPQQLRWPRPLGASVPLPSSLWLLASPLERLLSTWLTS

SEQ ID NO: 74616 - protein, 54 aa, Homo sapiens
KKRSPRWSLTMAPACAKLVLLGTTLPEPCFLPSSGAPDTRTPTWATRPRASVAS

SEQ ID NO: 74617 - protein, 11 aa, Homo sapiens
KKVRFPWILAL

SEQ ID NO: 74618 - protein, 85 aa, Homo sapiens
LRSPWLLFLLPQVGTGDASSFSQDRTMSLAAAPVREAPPPPTGASSEPSVPALPGADPQRSAELLLLAVTREGLERRIISRKRAE

SEQ ID NO: 74619 - protein, 18 aa, Homo sapiens
LCIPDLHTKCSYHFEMGS

SEQ ID NO: 74620 - protein, 16 aa, Homo sapiens
LIWHMLSVFWGRGDEL

SEQ ID NO: 74621 - protein, 70 aa, Homo sapiens
LVAAVVALCAGAELTGRSGRLWPRQLKPGLLMLPRLVLELLGSSDPPASAFGVVTGLKISFFAEGTHLLV

SEQ ID NO: 74622 - protein, 70 aa, Homo sapiens
VTGCVCEVWGAGGQQQGRWVVGSSQPPAADPALPDMVRVSLRSFHPPVFPGGCLLSLPVPTSSSWLWPRF

SEQ ID NO: 74623 - protein, 143 aa, Homo sapiens
MGPPGPRSKFTSTPPPIPPSAPLASAAWCHHRAAMGWPGPSPGALRGQPLWSTRVTVGGTPVTRLPTAQPLGTLSTAAARRMPASCASVARRAAGHLKLTTLCLGARPGTELAGAQGARRPTIISRTGIQGAWAAPRPPGSPW

SEQ ID NO: 74624 - protein, 48 aa, Homo sapiens
VPRSSSRWPCCLLSAGSMADPRGGFMVQVTWVFRVPSEGMCSALPRSA

SEQ ID NO: 74625 - protein, 50 aa, Homo sapiens
LLSGGRPTARSFFSALVRFLFGFLPASGATRVARQQPLGDLVLGSCPAWG

SEQ ID NO: 74626 - protein, 80 aa, Homo sapiens
MSSPPLSPGPLLLTRATSESWGQREVGSMPPGVGELGARVPLEFPVVAHGGAAPGPASAASLRRCAEAWCARSEPPYWVQ

SEQ ID NO: 74627 - protein, 59 aa, Homo sapiens
LLPVFACGREPGLASGVCRDAGAGSAEGGGPPPGAAQCGGSFQPGFAMLPTLPMLVSNS

SEQ ID NO: 74628 - protein, 30 aa, Homo sapiens
LPGWSAVALSQLTESSDSLVQAIVLPQPPE

SEQ ID NO: 74629 - protein, 71 aa, Homo sapiens [sequence omitted]

SEQ ID NO: 74630 - protein, 48 aa, Homo sapiens
MRCARSRGRVAAAAVGAPGPGDAAVARAPPRPHRPHGAPGGRRHRRDR

SEQ ID NO: 74631 - protein, 95 aa, Homo sapiens
MILIRKLFLRRCHWGGWLLPPARASCSGKHSLSHSCRGPRVQRPPHPRFWAGTLAPGPCPGLWCLPGLVQVDVLAAGRCDHLSCLPPLCPQAFLL

SEQ ID NO: 74632 - protein, 47 aa, Homo sapiens
LLLPGCAALAVCLTSHKCVCGVTTGTTNSAALPLFSLWLGWLHHGQG

SEQ ID NO: 74633 - protein, 34 aa, Homo sapiens
MEASSNLQFGQWVGLGICAPGGLQILPGIPPNPH

SEQ ID NO: 74634 - protein, 84 aa, Homo sapiens
VGCGSGLGPRAACPCCCAVLASLTGRHPQPSSVVHKCLVAELPVNFWIPFLMQTLVLFSTCAVRTHWPSGVLTPTPPTPCLSPN

SEQ ID NO: 74635 - protein, 46 aa, Homo sapiens [sequence omitted]

SEQ ID NO: 74636 - protein, 48 aa, Homo sapiens
VAAAAVALVAAVAEVEVEVEAEAEAEPEAARRGARRRGTRPRSVGILN

SEQ ID NO: 74637 - protein, 51 aa, Homo sapiens
LCQSYIFRMEWPRDDINKAYVTVGRRQTVFLAGTLAFVQGGSGVWEQQVPF

SEQ ID NO: 74638 - protein, 61 aa, Homo sapiens
VVVTQSLCMLSVIQTGNLVLCSRGPRLLSHIKSPRPLWTLNCTCLSHFLQIMINAISVSKL

SEQ ID NO: 74639 - protein, 115 aa, Homo sapiens
MGRKSGSRTGSLCALWGPTNPPRLQAFLPHAGSPARTMSPLCWLRRGTWRWGKALLLDISTPPHHWQGNWWRGRGGGGRHSRQQLEFYNGSSSQQDREGAWEGDAREARPCLPSF

SEQ ID NO: 74640 - protein, 94 aa, Homo sapiens
LALTALQLCSLPAQSLCRLGGCSWGSGHRAPGPGYCLLRTLASGLENRSPGWGRAWGQSHLQRRQQSGAGCRDGLARWQLQVPGRQALDAPKRW

SEQ ID NO: 74641 - protein, 38 aa, Homo sapiens
LEIHLSSSFPLTTLGLTCTSAVRAEFNKHNSLVFQSTC

SEQ ID NO: 74642 - protein, 31 aa, Homo sapiens
LGLERLVTWLARGGARGVGSAGLGLVAPAAA

SEQ ID NO: 74643 - protein, 38 aa, Homo sapiens
MAKPWPICVCVTPLPSRLGLAAGIPLMRWVPGTLEPLV

SEQ ID NO: 74644 - protein, 102 aa, Homo sapiens
MSRGVRGQGAPSLLLQPVKPGTAAPSPRAEAVSAARSDAPRPKGREIRGEPGDLRPRGAEGCTAPAPTGLFREDASPSCPREVLGSWMRKSLLSPAPRPRAF

SEQ ID NO: 74645 - protein, 46 aa, Homo sapiens
MAAAGLLPPHLLLPGEVAAASAAIAATGTSAAARELGLSRPTLPRP

SEQ ID NO: 74646 - protein, 48 aa, Homo sapiens
LGPPWDMAGWLAFFLSFFLSFLLSFFLAFFLLSLSFFFFLNSASLGTE

SEQ ID NO: 74647 - protein, 86 aa, Homo sapiens
VILPHLFPQLTPLCLSLTLLSPQPKPGHTLAAGGLGFDHRWVLFHFWFKNLLTWVMSCTQVLLVGKKQLLLHLHPSPMELAFSRPP

SEQ ID NO: 74648 - protein, 48 aa, Homo sapiens
MARPLSLAAAGAPDLLFTALCSLLIEAQPLRPFDLQVLGDPQPRARTP

SEQ ID NO: 74649 - protein, 25 aa, Homo sapiens
MWRGLCLSLQPEFLVSSSPFCVLCS

SEQ ID NO: 74650 - protein, 32 aa, Homo sapiens
LPCCCTQKRNMYRIVNLILDLPALVIVTHASV

SEQ ID NO: 74651 - protein, 30 aa, Homo sapiens
LCVCVCVCVCVCVYVCVFFLLSFGESCNMR

SEQ ID NO: 74652 - protein, 62 aa, Homo sapiens
VGAAEEMDINPGSPDSGSQSGFFSHPISPWFHRTLRRLLGCLTLTLSGRILNPSWVSSTGMP

SEQ ID NO: 74653 - protein, 71 aa, Homo sapiens
VVAAVATVVAAEVTAAVSPPGDPAPAPPPATTVGAAEEMDINPGVKSQGMKPAGAGNLGFRASEDREFPAT

SEQ ID NO: 74654 - protein, 28 aa, Homo sapiens
MSVRPDAWPLAAWEVAGAAFAFARDSSN

SEQ ID NO: 74655 - protein, 35 aa, Homo sapiens
MGPRWGLSGGSSAGGPVTVRTAAGMEGLSWLVVFS

SEQ ID NO: 74656 - protein, 22 aa, Homo sapiens
MGRPRPAWGAAQEAAPVAAAAA

SEQ ID NO: 74657 - protein, 28 aa, Homo sapiens
MAPARATSSAPAAAASSAAATAPPAGCG

SEQ ID NO: 74658 - protein, 31 aa, Homo sapiens
MASRLCGGALWYVCPCPSGAWMVPGTQLATS

SEQ ID NO: 74659 - protein, 39 aa, Homo sapiens
MFSTWSRTEKLLCLCSLGTHWKLYSDIFWDLVWIVQTGA

SEQ ID NO: 74660 - protein, 44 aa, Homo sapiens
MVESGAPAAACIAATAAPPRPPPPPALQPPPPPVSPPPRDRLYD

SEQ ID NO: 74661 - protein, 44 aa, Homo sapiens
MRRRAGVRGRVALPAARPLPLQLLAGLVVPCQWGPRSSRPGRRW

SEQ ID NO: 74662 - protein, 45 aa, Homo sapiens
MEAAAAAAAGSRCAPSTAAREVGKFAARRPKARGAAPLCRELSPI

SEQ ID NO: 74663 - protein, 60 aa, Homo sapiens
MCYSLCGGDRDEPGSPLAAAAATPAAAAAPAAARTPSARAHPGFPERDAAAAAPVRPRAP

SEQ ID NO: 74664 - protein, 68 aa, Homo sapiens
PGGPEVESARLFCACAARVTLLAAPRLPARRHLVLGFHCSRWAGRFSVIAAGGGGGVTSGQPRNPTIL

SEQ ID NO: 74665 - protein, 84 aa, Homo sapiens
MGLGRTQRAARVAVSRALAGTVAAAAGLGARRARRLHLRGQIGVRRVAGTPEARGRGDGCSLGRVSPDRTPGKGSKGMEPPHTG

SEQ ID NO: 74666 - protein, 85 aa, Homo sapiens
MRLHWAVISVMSDSCQRQQQGDTKWRRLSSYPWRRRQRWRRRRHLLQAAAAVSQAAAAPPAGAVAVARSQICLKTWIISIFVMDC

SEQ ID NO: 74667 - protein, 66 aa, Homo sapiens
MEITSPDLAFLSLFLFSPLPSDDWRVKGNPERGGEQRFEKMQECVWRRVKLPFKLWPPGTRCSAAG

SEQ ID NO: 74668 - protein, 65 aa, Homo sapiens
SPLRCSWGLLAALARRIHPQDLKLPKELLLCQRRVERAVGGVCLSGLYCLVPYYLVHIFPGTLGC

SEQ ID NO: 74669 - protein, 71 aa, Homo sapiens
MSGALTLYISPNLCVLCLIFCLGWSRSQEEADPCWLWENAEFIAWHKCKGPSPPCEFWSLMITYMCLVLSV

SEQ ID NO: 74670 - protein, 53 aa, Homo sapiens
MLLLVAAASGAGGAAAKMEEPSRRCCRRCRRRCCRRRPRSRSSSRSGDAVLSA

SEQ ID NO: 74671 - protein, 25 aa, Homo sapiens
MTPLFVPVISASGSRISSVPSCRAA

SEQ ID NO: 74672 - protein, 25 aa, Homo sapiens
MVRPVAVAAAVAEASLVGLQRGEDD

SEQ ID NO: 74673 - protein, 29 aa, Homo sapiens
MSRAAAATAAAATWGRAAAAAAAAGTRGQ

SEQ ID NO: 74674 - protein, 33 aa, Homo sapiens
MPLVCPLRCPLPSLAAARAGRGGTAEPTPSNSP

SEQ ID NO: 74675 - protein, 36 aa, Homo sapiens
EVAAVAVAAVAAAAAAGRRAERASGFRGSGEGGCSS

SEQ ID NO: 74676 - protein, 37 aa, Homo sapiens
MCARFRKAAHSRFLGVSAAVGSWGQGPGCWGVGRGSR

SEQ ID NO: 74677 - protein, 39 aa, Homo sapiens [sequence omitted]

SEQ ID NO: 74678 - protein, 40 aa, Homo sapiens
MGHGMRRRPQQAPAAPAPAPGPAAAAAAPALPPPGEALQP

SEQ ID NO: 74679 - protein, 42 aa, Homo sapiens
MSRLGIILRHHLASPASHFKVITGSGLPLKGILMLTTSPRRA

SEQ ID NO: 74680 - protein, 47 aa, Homo sapiens
FGKLGCGVIPVCLLPAFLGFFRRRGASLRNSRPLRATALAVSFASSS

SEQ ID NO: 74681 - protein, 54 aa, Homo sapiens
WGGETLTNQDGGGGAEGRGVWEVTVVAKAAVVGRQPHSLEETERDEEAVAVESA

SEQ ID NO: 74682 - protein, 63 aa, Homo sapiens
MLGIGCAATQRSPGAAAASAWAAYAASAAPRRGGRRRRRGRLGAAMAGGGARPGAAGLKLLAP

SEQ ID NO: 74683 - protein, 69 aa, Homo sapiens
GRVRSIWGLALLSASGREIGQIFSKRRRATPRTFHINCFGVSPQVGRGTLSFCIACVVLITSAATAVPG

SEQ ID NO: 74684 - protein, 83 aa, Homo sapiens
MNFSNRTRKALQPCLALRSQESLSTLSLPSGDMCSSPHCWEVMLPHVLVQVSILGLGSWQDLPGKAVCHHGAPEKKNTSHHCG

SEQ ID NO: 74685 - protein, 22 aa, Homo sapiens
MAAAAEVSVLVASVGWAFARGS

SEQ ID NO: 74686 - protein, 26 aa, Homo sapiens
MRTARESRALSPVLLPRAAVALRPLE

SEQ ID NO: 74687 - protein, 34 aa, Homo sapiens
MRPAAVAPASAGAAAAEAAAEAAATAAPPPADLD

SEQ ID NO: 74688 - protein, 34 aa, Homo sapiens
MAAAPAAGAIWATAAAKAAAGPTGGLHGGSRGWP

SEQ ID NO: 74689 - protein, 35 aa, Homo sapiens
GALQSSSLQVLLLNSVLGTSGPGKEPKRSQPASRR

SEQ ID NO: 74690 - protein, 74 aa, Homo sapiens
MRRAPASPPPARAAAPAFPAVVPHSVPAPRGRRLLPLGAVAACAVSAAQPLSPSLRQPRRTAHQEARARMGSLC

SEQ ID NO: 74691 - protein, 22 aa, Homo sapiens
RISAGLAVTLSPSGLTGSEGHA

SEQ ID NO: 74692 - protein, 23 aa, Homo sapiens
MRTRRPPGVAAAGVLALCRSEVE

SEQ ID NO: 74693 - protein, 23 aa, Homo sapiens
MMFSILMEVLICIPAPGNVFIHG

SEQ ID NO: 74694 - protein, 25 aa, Homo sapiens
MLHLWHSATSLALPLRTSEPRPRAQ

SEQ ID NO: 74695 - protein, 25 aa, Homo sapiens
MSLALSRGLLLLLPHQSGWCCGRRA

SEQ ID NO: 74696 - protein, 26 aa, Homo sapiens
MILRPPQPCATACLLLWAQCLPRSME

SEQ ID NO: 74697 - protein, 26 aa, Homo sapiens
KSPAGQGAPLAAAALALSQCAALQPA

SEQ ID NO: 74698 - protein, 27 aa, Homo sapiens
MKKEIFRFLPLKSLLLPLQRTQPMTSG

SEQ ID NO: 74699 - protein, 74 aa, Homo sapiens [sequence omitted]

SEQ ID NO: 74700 - protein, 29 aa, Homo sapiens
MLLAAPASSPSSRAACWGFVVARTPRATP

SEQ ID NO: 74701 - protein, 29 aa, Homo sapiens
PVVGLLAALTLNLSVRGEGICRCGFWSCS

SEQ ID NO: 74702 - protein, 29 aa, Homo sapiens
MCSLLCCILSSLTTVPSTQRALPVYLLSK

SEQ ID NO: 74703 - protein, 30 aa, Homo sapiens
MCVSACPARSMLPPLPVPAAAPGAAGNARG

SEQ ID NO: 74704 - protein, 32 aa, Homo sapiens
MFSSPAPAALQAAAAATKTTTATATPKHSFRG

SEQ ID NO: 74705 - protein, 33 aa, Homo sapiens
MVSARGGAGGAAAAADATAAAAAAAAPAPASRR

SEQ ID NO: 74706 - protein, 33 aa, Homo sapiens
GVRLKTCWRGVTSLLLSLSSSSAPRFRGCPSAL

SEQ ID NO: 74707 - protein, 34 aa, Homo sapiens
STSLPGQVVTLLLPALSASAWKIEALSPSGEVRA

SEQ ID NO: 74708 - protein, 35 aa, Homo sapiens
MMRPCLGRCSRRRRRRRPGGAAAPGDPARASDPIT

SEQ ID NO: 74709 - protein, 35 aa, Homo sapiens
MGNSRGAAAWGLKGAASATAMAAGSSRRLQLLLAQ

SEQ ID NO: 74710 - protein, 35 aa, Homo sapiens
AGESWRGRWPRGARLVAGPALQPLAARVCSLLVLG

SEQ ID NO: 74711 - protein, 35 aa, Homo sapiens
RGSPVSRRRLKSELLGFAQIGVGRACLWGAATPYC

SEQ ID NO: 74712 - protein, 47 aa, Homo sapiens
MSLLLRAVVPPPSAASFLAPSSRRLSPPPPQLHWGYGWLVGRRGHLG

SEQ ID NO: 74713 - protein, 37 aa, Homo sapiens
MSWALSGAAPAGCPSAPASWRDLGLLACPVPAARRCP

SEQ ID NO: 74714 - protein, 38 aa, Homo sapiens
MSFTKLSLSAMPALASKMDEWVSPRKSVETTWKSEFQR

SEQ ID NO: 74715 - protein, 38 aa, Homo sapiens
VAPQVQLVSVLFLFQAPSNGGLQASGPLTILEVKISSG

SEQ ID NO: 74716 - protein, 39 aa, Homo sapiens
HRGRRAVPCGARGLADPGCCAASATVAAAAAKAGGGLQW

SEQ ID NO: 74717 - protein, 40 aa, Homo sapiens
MQSAQRSGERGTPRTGPGSSSFAAAATTAATAARGGSSRA

SEQ ID NO: 74718 - protein, 41 aa, Homo sapiens
AAAAAAEAAAAAAVAAAKVAAARPVLPAPAISDWERARRRH

SEQ ID NO: 74719 - protein, 42 aa, Homo sapiens
MSRRTSIRRNEENESFKLQSRSVLFRHKIISLILSPFAFASR

SEQ ID NO: 74720 - protein, 42 aa, Homo sapiens
RRAVPASTVSGVVAAAVAEDYGDKDEGRSPSSLRAAPLRSAG

SEQ ID NO: 74721 - protein, 43 aa, Homo sapiens
MSVLGCGPGRKAARGSSTASAAASSACATAAGAGPLCWSGMRP

SEQ ID NO: 74722 - protein, 43 aa, Homo sapiens
MMWKGLCLSATENFILAVFVETAFGKRKEMNFTDLTFLHLPFF

SEQ ID NO: 74723 - protein, 44 aa, Homo sapiens
RFALPALGIPLFPSASAALPFSGAQLWSFHPARQRGEGARAASG

SEQ ID NO: 74724 - protein, 44 aa, Homo sapiens
MEPSKFSGFAFSWSLVAQRRAEVEAYLRRSHQGVRRRRKGMSRA

SEQ ID NO: 74725 - protein, 46 aa, Homo sapiens
GEVTWAPAARLSALGFLRPPAPATASPAPRRYLSKVPLEAPGWGRL

SEQ ID NO: 74726 - protein, 46 aa, Homo sapiens
MPLPPLRPGRQLAAAGVGARSSLAGTPPWPVLSSRGGRGAPGPGAA

SEQ ID NO: 74727 - protein, 46 aa, Homo sapiens
MRSSSPRSDRRLSPSSSLLPASHPPLACPSASFAAPPPLGRRAHSD

SEQ ID NO: 74728 - protein, 47 aa, Homo sapiens
TVRGAASLAAAAAAVAGADARSSPETPGGRSRGAAAERAPRGVWRGE

SEQ ID NO: 74729 - protein, 47 aa, Homo sapiens
AAGLLVTSSAVAGRGSFASEGCLAGPNSVAPRPPVSAFCIAASAAST

SEQ ID NO: 74730 - protein, 50 aa, Homo sapiens
MDTVSTWGLRYVAAALSFISTSQTFDLPTLSSLLMKLKLLCDAYCPRSFC

SEQ ID NO: 74731 - protein, 50 aa, Homo sapiens [sequence omitted]

SEQ ID NO: 74732 - protein, 51 aa, Homo sapiens
LGTESPGRRLGGRHLFCPGLGLPEHLSFLSQIVFSFSFKASGVAATLPGSL

SEQ ID NO: 74733 - protein, 52 aa, Homo sapiens
TALGRSSRSRLYFRRRETSVASLSCGLSPSPSLAVLRHRTPPHPISRNLQTS

SEQ ID NO: 74734 - protein, 53 aa, Homo sapiens
MSLPRGRPGSLSSLWPLPSARADEVRVALGRSAWHAQRRRAGGLGCHRVREEI

SEQ ID NO: 74735 - protein, 55 aa, Homo sapiens
MACCFWTRRLHSTLTVLNAVGSCNAMVFRQTQPIVNQKMFKFTCSLEASLPCSDL

SEQ ID NO: 74736 - protein, 55 aa, Homo sapiens
MGTRARPGSRCRRTAPSLALCARSHPVTLPAPRALPPELLLLLWLLSPPPRVARC

SEQ ID NO: 74737 - protein, 55 aa, Homo sapiens
LARLTSALEQPFGSWSASTAGQSPSQRARRGAAIRRPAPAPWLVFSAGASGGTWR

SEQ ID NO: 74738 - protein, 56 aa, Homo sapiens
MSFRVYGFVGCFHLLGGWCTLTQGQKPLSVLRTLADLFTWLFIFHNQLVDVTSKRK

SEQ ID NO: 74739 - protein, 56 aa, Homo sapiens
SQPAPALLLGTARSGPSSTSPFPIPVVAAVLQPPAELTRVWGLAPLAPFGFSYCLH

SEQ ID NO: 74740 - protein, 57 aa, Homo sapiens
VRARSQALPRKCSWRIVGSAQAVLAAAATAAGGSVVARWPRGAALGGRHCSLFSLAF

SEQ ID NO: 74741 - protein, 57 aa, Homo sapiens [sequence omitted]

SEQ ID NO: 74742 - protein, 58 aa, Homo sapiens [sequence omitted]

SEQ ID NO: 74743 - protein, 59 aa, Homo sapiens
KRAGGGCGAAGAATAAAAACWLPRLPGGDCWKLQGTAAVLCHIVSSPAGPSPPGRADEL

SEQ ID NO: 74744 - protein, 60 aa, Homo sapiens
ASALACHRYRSDWASGLYILAALSTSSSIGSSGGRGNWQQVGNYVKESPDVIISGCHRNI

SEQ ID NO: 74745 - protein, 61 aa, Homo sapiens
MFKIQPKIVLCCCMSHTVVRSCEIATCAKRNVSVTCPRNTAEAEREDVLIYHYRYMKALFI

SEQ ID NO: 74746 - protein, 63 aa, Homo sapiens
MASYVAIRQSCCSWFFSLFSSAKSKSSRVQKQHSCLKARKSLQKQNKKTWTDTPLRNRQKKRN

SEQ ID NO: 74747 - protein, 64 aa, Homo sapiens
MQSPRPGAGRRGSSLSSSLSISTGGTATAGAAQAHCAPRSLQFPSPVCGTATVWAAAAGGALLP

SEQ ID NO: 74748 - protein, 64 aa, Homo sapiens
MFNGANSISFSFSSSSSSSSSSSSSFSSSSFSSHQQEDKPRTVLKYRNFLFGICQRQDCRNKGR

SEQ ID NO: 74749 - protein, 65 aa, Homo sapiens
MFLGNSLETLTNRILVSLASVFLLPPRKGAGLCSRQDRRAPHAYTSLPELSPRASGPCLETGLAL

SEQ ID NO: 74750 - protein, 71 aa, Homo sapiens
MFAPRRPLAAAAAAATAATGAAAHYAKRRQMRAGPAGRASASPPSGSPRRRLTLPGDSLGPDLGPRRAGMA

SEQ ID NO: 74751 - protein, 72 aa, Homo sapiens
AAVILTFSAAASPAGRGRAALGGPARPALPPRPARPSAHPGPEGSPRSEGRGEGGEGVRASRWRGHFPQRDC

SEQ ID NO: 74752 - protein, 42 aa, Homo sapiens
MAAALVVAVDGAAGPGTVGAAASRRMTQDGKRAAEPRRFPCL

SEQ ID NO: 74753 - protein, 73 aa, Homo sapiens
RFAQGIVGRAAGAAAAAILGAPGATGFSLEAAFVAAVDAGKRHKVRWPTPFFPPASVEPPARVRRRRRGELAA

SEQ ID NO: 74754 - protein, 75 aa, Homo sapiens
TLGSANRAFCGLCGESWRRRLPVAGLGAAPVGGLLPGPAAQPSRRLGGHSQAGLRGSGSVDPSRQNSRSAAAFKT

SEQ ID NO: 74755 - protein, 58 aa, Homo sapiens
MAPAAGAASAAAGGRPEAVLAVAAAAVARRPGTESESTVASAAAAAAAAVATAAGTRS

SEQ ID NO: 74756 - protein, 79 aa, Homo sapiens
MSCGSRRGPSLASSLAWLQLQSGTRPFCSSSPPYFLSHGRRIPFSHPRKESALRATKEPRTHRTNTSLADLPSPAPAHL

SEQ ID NO: 74757 - protein, 81 aa, Homo sapiens
PRLPRSRAAASPNLSLLLALACERELARTRKQLEVTPGRLRLSGPSRADRWALCRGKAGVPGSLSQSRACFCAGPVEDSGQ

SEQ ID NO: 74758 - protein, 66 aa, Homo sapiens
MLGAFSARSCPSPSPAALARRPPAPAPAAALGTPAPGAQLPATAAAWVWGLLRLSRASAPALRTDA

SEQ ID NO: 74759 - protein, 86 aa, Homo sapiens
RFKKRACKQRCCSTPLRPRAAARRTATVAAAARAAPKAGVAATGTSVPAALLLAAHAVGSGTRRLALQTPAELQKPTERRPARHGP

SEQ ID NO: 74760 - protein, 90 aa, Homo sapiens
MTIYLAFVSLQLPRDAHPTASARAQPSLSSCHHSLEAPASTLPNGAPPSRPRSRIQAPFAPCLGAVAPGLSQWTPCGGKGRTFAQTRLQL

SEQ ID NO: 74761 - protein, 91 aa, Homo sapiens
MEFFIPTSVDLKILPLSACLGSAVSSLPWFSDDACNNAMRFAHSWVTLVIHSGGDLTCHCEQLLLLDDPGHRPASTYPSVLENRARLLPLC

SEQ ID NO: 74762 - protein, 92 aa, Homo sapiens
MKQRLRGQQGFQLDVCVACTLLFLLLTVNSGVTSREQLGCSRPSPAQGEGRGTCSSEQPEGGGRSEVVEVVCVSYWSEGTKCVCCLFCILFF

SEQ ID NO: 74763 - protein, 94 aa, Homo sapiens
MKAFMGRLTWSTGLDMLSPCRGCSPPPPGPSPSARRKSMLAARGDPLGRPGLVAPRRRSRPGGGGWGTSPGPRRAPGRLSVSGRALEQVVSGTL

SEQ ID NO: 74764 - protein, 97 aa, Homo sapiens
LGSCGRGHREALGCAWLLLVGALSRRPAWGGGGVDSSPASPWRGGLHSLLRPPPLGPQRLGPASCFPACRRSRWLEEVFTSQESQSVSGPRWEKNWL

SEQ ID NO: 74765 - protein, 98 aa, Homo sapiens
MLLTFSSSSRHRRLYRRRRHHLLFVVLLPPPPGSVVLCSGGEKCYVRKVPGGTTWSHAPWALPRAPARCPSLEAKGLLWKMELIVHFPECISKPINGT

SEQ ID NO: 74766 - protein, 35 aa, Homo sapiens
MAALPPLLGSVGSWGARSGPEPELASRAETCAPRL

SEQ ID NO: 74767 - protein, 99 aa, Homo sapiens
MREQQRPRPGFSGTLGFFPLGLDSGSAPQALSAQGGGDDAPRGDARKTGPRLLGLRQGACATRARPAQAAAAQGGARRCACAVVGRGGKEGGGGSGGGC

SEQ ID NO: 74768 - protein, 100 aa, Homo sapiens
MADEQRAGFSPCGSLSLTVLGGCFLSCCPWESDSRFFSLWPLGLSGLGGLTRSTRWASLVWGPGTWRSPAASVRPVLGVALKRQPVPQSPWDYRSVEEML

SEQ ID NO: 74769 - protein, 101 aa, Homo sapiens [sequence omitted]

SEQ ID NO: 74770 - protein, 102 aa, Homo sapiens
ARGFSALSPRRIPGVDLLAASLCLPSCAPFPASRCCWRALAGFFLPRPRDGGECGTEEPGLPTRWARAPKGPLGSERGGSPRGPRPSLASDCATLRSGLTGG

SEQ ID NO: 74771 - protein, 106 aa, Homo sapiens [sequence omitted]

SEQ ID NO: 74772 - protein, 109 aa, Homo sapiens
GAHGPPGARGRERAQPGRPGTFFLALLLSFSPRASPARPSARPLFLCGGDRIPRGTRGHQAGPAGCAAKARSPRPRAPPPPAAGLRETSGRASAARARGEPSRPPCPRP

SEQ ID NO: 74773 - protein, 111 aa, Homo sapiens
MAVSAFWSFLLPCEEGACFFFAFCHDCHVNRTPGTVQGPPVWPHAVTLSKGVTTEVHGKAERCDVLEDAGGKHAQRTGAITRLRAAAENLAWATVVSSVEDTCYCSQSPSG

SEQ ID NO: 74774 - protein, 117 aa, Homo sapiens
LGRASASALGLPAACSGSSGRGLAWPGAHPGGCSPCLTCGGVTGPGPAPVHLRGLHPPAAGCPALCAEALPCPAGRRAGLGLAAASGDGGCGLPPSSARLRWGPPPGLPAGTGIHGP

SEQ ID NO: 74775 - protein, 126 aa, Homo sapiens
PPAAAAAAAAATATATATATAVAAGFVGSAAEQEPELWPELWPESQGAGRLIPEVGAEDRRARTRGHRPLPLLRLRERALGASEAAAAGAGQRGRPLAATPPSPALPGPAPSPARAWSDRERRRRG

SEQ ID NO: 74776 - protein, 130 aa, Homo sapiens [sequence omitted]

SEQ ID NO: 74777 - protein, 33 aa, Homo sapiens
PPLVVLGSRLAPLRGVALSSSLLAADLLSRSAD

SEQ ID NO: 74778 - protein, 36 aa, Homo sapiens
MGRRRASAAASTSPHAGGMAPGPRRSRASGGLLPRC

SEQ ID NO: 74779 - protein, 38 aa, Homo sapiens
MMWRTWMLSCFSSNGLRSRWPPSDLSDCVGAGPLVSNS

SEQ ID NO: 74780 - protein, 53 aa, Homo sapiens
MRQRAARTRTAAAAAGAASWARGARCLRAGARALGNCRPRRLRRRWFRTHTPR

SEQ ID NO: 74781 - protein, 58 aa, Homo sapiens
MAAALRRPVSSSPPSSAPPLAASSSRVSSSSFAASSSSCSSTSDRRSAGSLTRSSGGG

SEQ ID NO: 74782 - protein, 81 aa, Homo sapiens
EVRRRRGLELRRGLGRRAAAGGGGHVATAVAARAAAATAAAASARAAGRPPTLPPRGSPSSLHLAPLVPLARPGAALCFSL

SEQ ID NO: 74783 - protein, 40 aa, Homo sapiens
MRFTARSASSSRRTSKQAAWPGAGSCSASASAASHPQRGS

SEQ ID NO: 74784 - protein, 29 aa, Homo sapiens
ILKAPGLTGFFVLSTGFCFTTGHKHVRQK

SEQ ID NO: 74785 - protein, 33 aa, Homo sapiens
LGRRRRFLRASLSATLLRASEPASRRPAEQNGK

SEQ ID NO: 74786 - protein, 29 aa, Homo sapiens
MAPFILFGRMNRSCLAFSSSSPPLLCSES

SEQ ID NO: 74787 - protein, 58 aa, Homo sapiens
LPSSLPPSLPLSCLSPAPAPGALPAPAPLPSPPLWTGWAGLGPAGRQHRGWGRQIRGS

SEQ ID NO: 74788 - protein, 71 aa, Homo sapiens
LTDTGATTDTLQGWFSPVQGRCAHCRTCSILRPTPLTKGQRTPGPIVLLVMDLLTLCSKFSFFSWLFFERG

SEQ ID NO: 74789 - protein, 105 aa, Homo sapiens
MWALRPKPFPAEFPSQTPPTPRCAPLASGGGGWACISEGRGTATHSPKAPLHIVSLILGCLHCHRCTHSLMLTLPLLRSSLGLCPGLLPSTHFFGLRASLSGPLI

SEQ ID NO: 74790 - protein, 62 aa, Homo sapiens
LMFQKTRGPSEALPTLFTIIWLFSRVDHMMRIKISPTNKAFSTLLTFVWFLSCVDHAMTIKC

SEQ ID NO: 74791 - protein, 67 aa, Homo sapiens
LVSVSLAISLSLKISAPVSMSLSLCAPRIFRAPTPVPRGPRLGAGPPTSAETQSVERSPPSPHPQPL

SEQ ID NO: 74792 - protein, 35 aa, Homo sapiens
VSVEARTRGGAGTAAAAAAAGGTLIPVLRTPRASP

SEQ ID NO: 74793 - protein, 26 aa, Homo sapiens
MAAAAAAGAQLSWAGTALLELPQPTT

SEQ ID NO: 74794 - protein, 63 aa, Homo sapiens
LRTRETDLRGFSHLARPTLKSPPAAFLERLPVTKRNRTQSSLAVSKQQASAPPSCTLGLLKLT

SEQ ID NO: 74795 - protein, 56 aa, Homo sapiens
MSASRNLRTLKGRTAPGSTLPLRRRPPPHSRCLMSTFSRWLRSPCQCLPRSLHTQT

SEQ ID NO: 74796 - protein, 51 aa, Homo sapiens
VHRGRLPSLPSLLFVFESGSCSVTQAGVQWRYLDSLRPPPLRLSDSPTSAS

SEQ ID NO: 74797 - protein, 83 aa, Homo sapiens
MPIQHPSRHSAVSCLGVAAAMARKALPPTHLGQSWFCSCCRDTELAISALRARTATGSPGSCRCTAGPLPCASALESCCCRVT

SEQ ID NO: 74798 - protein, 54 aa, Homo sapiens
MAWTESCTAACAFPSCLVLLYRGRGVPTDLQVPAPLFSTQSKLKRPGFPKTHVT

SEQ ID NO: 74799 - protein, 75 aa, Homo sapiens
LSGFSLAGTSQLLASLHEAPAPGPAYRGPSSSCSHWKLITWSEDLTRRSLEEEEEERKGVRDGPYSDSISRDPVT

SEQ ID NO: 74800 - protein, 88 aa, Homo sapiens
LVSVEFPVSPKGSVTTLVRYMLIILLEPAVQGVGVSPGKSILQVLNLISANMLTKLLLIPHYSSHTCSCTFFFSMIFMPLLRELTKLN

SEQ ID NO: 74801 - protein, 138 aa, Homo sapiens
VRKHYFSKRSFLPCSLLQPLAQPLRPLPVNDAMEGVLGSPCVPCIGASQPPGPLLWGSRHPHATNRRQGRPLSPVHLLGRTRGCGTEEVQVIPGDRDRAGRRQDPLGKHGEGRSPGNGPAAHHPLRARGGLEVGSQHL

SEQ ID NO: 74802 - protein, 139 aa, Homo sapiens
LPLQEAAAGLLPALPPARLLSACPAPTHHALQPLLPQLLPFSLPGMGGAGLRLGLVLSPVPGPRPVTVCLSLSFPEGAMELRMPASGLSQVLERKKPCLPSATGLAMAGDRLGDLLSLWPTSAPSPSSRELVGRREGGR

SEQ ID NO: 74803 - protein, 53 aa, Homo sapiens
LLGVPHSPLSLLCSAFHHPVFLRLLVSVCPSPLLCVSHLCLLLSLFPALSLCL

SEQ ID NO: 74804 - protein, 32 aa, Homo sapiens
LDRRGTSTSILLLLSPASPAAPNRPVKMAAAG

SEQ ID NO: 74805 - protein, 58 aa, Homo sapiens
MPMLLWRLSWKVTRSCPPAREQKKMLLVHLTKKSRAACDFSLALQSPGALSTFCQVPL

SEQ ID NO: 74806 - protein, 65 aa, Homo sapiens [sequence omitted]

SEQ ID NO: 74807 - protein, 102 aa, Homo sapiens
LVFFPGFLSLAQEGTVGRVRSWSSVLHLFTCLTAGLCALESQTWGSAWYPELWSLCPTTHPTPSVSSISPRTTGCPLVSGPKVPAFSSALPSLPIYFLHFLS

SEQ ID NO: 74808 - protein, 116 aa, Homo sapiens
LGPKIKSQEKIMERKIHWNSWRASLSLESLFCYSLLLLLPFPTPSQAREICVKFTRGVDFNWQAQALLALQEAAEAFLVHLFEDAYLLTLHAGRVTLFPKDVQLARRIRGLEEGLG

SEQ ID NO: 74809 - protein, 71 aa, Homo sapiens
LGLLVPLASFSCAPPTPSGGHRPRRVAGRGSRLVPGACKWFCFARLVCAVVWFDLFVHPVKNNGACVTSIE

SEQ ID NO: 74810 - protein, 39 aa, Homo sapiens
MEPFFLSFFFFKFCIFHPTAVCRENIMQMPLIFYPMFTS

SEQ ID NO: 74811 - protein, 30 aa, Homo sapiens
VPSSFLPISSCCLVSVLEGKGIKGDINQNS

SEQ ID NO: 74812 - protein, 17 aa, Homo sapiens
LLLLLLLVAPLQMYCCP

SEQ ID NO: 74813 - protein, 10 aa, Homo sapiens
IVALIPILGL

SEQ ID NO: 74814 - protein, 27 aa, Homo sapiens
MLHGTASASPALLQAEGYRPAQPAPAL

SEQ ID NO: 74815 - protein, 44 aa, Homo sapiens
TAAAAAGGAIAAAVAATGRGAAVGDRGRGCRRRSGWLANTWCHM

SEQ ID NO: 74816 - protein, 87 aa, Homo sapiens
LEFLAGVLTSGYFCPAAAARLPFCLFCVTSGQVLVQSVAKDAEREAGLPRHPSAKCMCVCKPSLAVGRPRGPVQAAAESRARERPRE

SEQ ID NO: 74817 - protein, 51 aa, Homo sapiens
LQKTFLSHIFLLLISQQLKFQLMDSILPVKTSSPENCASWHPAVPKYYLTH

SEQ ID NO: 74818 - protein, 119 aa, Homo sapiens
VVSKRSCRLLRCRCWFSHLLGLFSSSVPTLSFSLQPLKILVSPWAAAPPVVTGIVRTSRTQSLASAEVSLMPRFAFLTWGGKRQKWMSFRFVATWCQMNMSSCPLKPWRLPEFVPISTW

SEQ ID NO: 74819 - protein, 73 aa, Homo sapiens
MSRTPEFGTSSPTTLRRLSCRAALCTLSWISQTPIPSQLSPAVRCCHRARTSKMCSPGTSTAASSATWSMSSS

SEQ ID NO: 74820 - protein, 24 aa, Homo sapiens
LLLLSFLISDWPPPTGSAEHKYSG

SEQ ID NO: 74821 - protein, 35 aa, Homo sapiens
TCSGIFSTRGRHRRRLASSGLICATCPLHTPPPSW

SEQ ID NO: 74822 - protein, 76 aa, Homo sapiens
LCKQSLVYSCLHQSTVRFMKKNKLRTTLYVHLQMPQLMLVGCLSAFCDNEHMDFCLLNSVDPFSQLPGAWIFTSNC

SEQ ID NO: 74823 - protein, 56 aa, Homo sapiens
MKHLNEGLITLNSAFVKYAFLLSSFILQYVCRSVDSDLNQIYFTLSLICRYVQTTS

SEQ ID NO: 74824 - protein, 27 aa, Homo sapiens
MVNPGSWCLELFFPLLLTKEHSLPLPS

SEQ ID NO: 74825 - protein, 93 aa, Homo sapiens
TAAAAGPMAPTTRRAVSFGLMAPAPSGVAAGLGVARWSAHLPAVGWVKCVASCHPASTAASPSAQLSARRGVTPITSLWMGTDSISKAPASTC

SEQ ID NO: 74826 - protein, 93 aa, Homo sapiens; identical to SEQ ID NO: 74825

SEQ ID NO: 74827 - protein, 148 aa, Homo sapiens
MSTCPQRICPRAGTGAMWMVSTMPASPGTSTSPNTAAPAGPTPAPALWRIGSTSRGRERGPPPSCPCRTSSTAVTLAPVKGVMTCPCGTTPTSTASLTRPATTTRPRTRSVTSLTNVGHAMNSKSATPSGTTPSGGWETTAPSLGGRR

SEQ ID NO: 74828 - protein, 31 aa, Homo sapiens
MARGPTSLSAAIWGTVLEAGIQGQIRHRSCS

SEQ ID NO: 74829 - protein, 93 aa, Homo sapiens
MRPWYQAWLRRSSLLRSSSSSSSFFSFSGVLSMMCLSLENCNTESTMSSPCPGHTRPCQLEVTACFTNPTSYATACIQGDVATGLSSDQGAEM

SEQ ID NO: 74830 - protein, 89 aa, Homo sapiens
MHLLTSCKSGTFSAPLLLCCRREKLGMCSSGVPSPPASHCPCLPKTSSLSLLCPPPPPSAFALLSSFSPEVRAASSPLVLFLPSLCSLL

SEQ ID NO: 74831 - protein, 31 aa, Homo sapiens
MGSSTWGPCAGSWLCASCWPGSSATSASGRG

SEQ ID NO: 74832 - protein, 52 aa, Homo sapiens
MGVSLCCPGWSAVVQSWLTATSASRVQAILLPEPPEYLELQSQILTLSPRLA

SEQ ID NO: 74833 - protein, 61 aa, Homo sapiens
IFILVFLLLFSSFVFFFSLETGSSYVGQAGLESPGSSDPPASASGKVGLQARIAAPGQSLF

SEQ ID NO: 74834 - protein, 224 aa, Homo sapiens
MLTVILFCKLLALLFSCSSVSEAGGFQDAPWIINFDDAESARGDRSRPVPQSPRSPPSPQACAWGELSPGLRLAGSGTLAVAPPLGPGLEAAANLFLPYLGDLVAAAASPSLDPAGRGSPGPTPPTQTKTAPSRRDSAPSGGGGKRGGNMAPPKCARRPLGCGGRGRRSRGGRQVHVLGDRSVAVGRDLPSPDGSYFQDIFIFYPLFCVHFITSVYRGNNAKLF

SEQ ID NO: 74835 - protein, 57 aa, Homo sapiens
MFIYKDLACSCVCGAALVSQLSITLARVSPCGFLLLRLPGWSRPHRRARGPARSCVQ

SEQ ID NO: 74836 - protein, 34 aa, Homo sapiens
TGLELQGERRRCVLLRVGRALVGAGSGAGLSALA

SEQ ID NO: 74837 - protein, 59 aa, Homo sapiens
MQLWWRPLSFLCQCLVILQRDAALHRDAHAVSHTSLHHLDCPALCILKPTACRSRHFSI

SEQ ID NO: 74838 - protein, 19 aa, Homo sapiens
LVMLLLLLLPPPPPLLLIL

SEQ ID NO: 74839 - protein, 11 aa, Homo sapiens
KKIKMISIMWI

SEQ ID NO: 74840 - protein, 64 aa, Homo sapiens
IHYSRLDRLLWLSLLAWCICYGKRDYNLVLFVEMTTLIKSTHCWSQHTWKVLQGLSYRKPRDRK

SEQ ID NO: 74841 - protein, 16 aa, Homo sapiens
IPLVQFSMFLCVLHLL

SEQ ID NO: 74842 - protein, 15 aa, Homo sapiens
RLAKSSLLWMFFMML

SEQ ID NO: 74843 - protein, 11 aa, Homo sapiens
IFFFSLSVWLC

SEQ ID NO: 74844 - protein, 28 aa, Homo sapiens
TIFALFVTFYSNHLFFCGNWHCPNFYPL

SEQ ID NO: 74845 - protein, 58 aa, Homo sapiens
VCMWVQPWEHCGSASQEPWRSRSLKTQWWHWWAPMPPCAAPSPLSLASAWHSSTSSGS

SEQ ID NO: 74846 - protein, 18 aa, Homo sapiens
LPSALFISSLNLLGISVS

SEQ ID NO: 74847 - protein, 31 aa, Homo sapiens
VGRFWALWLGFCNFSLGTAVEPHPLWIIIAT

SEQ ID NO: 74848 - protein, 12 aa, Homo sapiens
MGIPPVLLLLFS

SEQ ID NO: 74849 - protein, 81 aa, Homo sapiens
LREQARPGSLAAAWLQHARPPGAAAAAAPLAARRALLLFSLVLAAVLRLCGARHSEHLPLHDASPRHSDPGQRENNRCSGL

SEQ ID NO: 74850 - protein, 73 aa, Homo sapiens [sequence omitted]

SEQ ID NO: 74851 - protein, 54 aa, Homo sapiens
MSKMPVFASLLVVSCFYQISGHYPTNTIKMFEQLDFKHFRFVEWCSPSGTALSK

SEQ ID NO: 74852 - protein, 41 aa, Homo sapiens
MSAVAKISSTSTTCSGLPPSSTLLACSWASSLPLSLEALRT

SEQ ID NO: 74853 - protein, 41 aa, Homo sapiens
MCHQYLLYILQALLSYFTSFTCLTWLDANTLDEFERTMLPF

SEQ ID NO: 74854 - protein, 29 aa, Homo sapiens
ILNAISSLLALGHFLLDPALLSAIVKDQP

SEQ ID NO: 74855 - protein, 43 aa, Homo sapiens
LRALPAGLCAASGAAAALGAPLGAGGDREARVKGATGTLARYG

SEQ ID NO: 74856 - protein, 91 aa, Homo sapiens
TGGALLLVPLSQSSPSPEVTAHPEWKSRRPTTQPPGRPWWHRTTSTTSRGPRTGCLRCRRSNKPAWRIFQEEDISITLNLLLKKLYKNKLR

SEQ ID NO: 74857 - protein, 60 aa, Homo sapiens
VACSRLTTTSVLWAQAVLASQPPKELGPQHQQQQLVIGGDRIFSCTSPHQCTANGLYPVL

SEQ ID NO: 74858 - protein, 30 aa, Homo sapiens
LLGVLPVSLLTVFGVASRIQRRPIVTPRSS

SEQ ID NO: 74859 - protein, 25 aa, Homo sapiens
LGSLSGGWVLLVPAVPASKNHWVCR

SEQ ID NO: 74860 - protein, 37 aa, Homo sapiens
LSGAQRFGRLIDHGARVLLVAAAAAAGARLCDHARTL

SEQ ID NO: 74861 - protein, 77 aa, Homo sapiens
LFETVMTFLLISLLVSFSGRAGCLEFSVKETQDSPLFLCLWESPWHTPKRGPCSVSQGSFCIFGLASYICHVVSSSA

SEQ ID NO: 74862 - protein, 72 aa, Homo sapiens
LFCFSFWLFILVATIRKSNTNSNCFLLFTFASLLVELWQVLISNTEHDLPPANVEPGIAASPDSSFIHSDSP

SEQ ID NO: 74863 - protein, 38 aa, Homo sapiens
LGPGLLLSLPSIGAQHPLPAHPSDSNSSPAPRPCVHFS

SEQ ID NO: 74864 - protein, 26 aa, Homo sapiens
MSLVICLLLKVTSRASSWHCFWNTVT

SEQ ID NO: 74865 - protein, 50 aa, Homo sapiens
TPLEPRLPGVVPAAAAAQAASALLCAGPLTPPGPSPSAGRDPGGDHESDR

SEQ ID NO: 74866 - protein, 39 aa, Homo sapiens
MRLTACGSWSCVRSVRSLSPRKPWRSTASLSTSRLMDLA

SEQ ID NO: 74867 - protein, 21 aa, Homo sapiens
VNVKCKILVMCFLFLFSCELN

SEQ ID NO: 74868 - protein, 36 aa, Homo sapiens
LPPSPTLGAYLLLWACPASLCTQCLARATGQCWGCH

SEQ ID NO: 74869 - protein, 39 aa, Homo sapiens
MTSGRKMCCAMSPSLWRDSGSALTGPCWRHAAVTSTQES

SEQ ID NO: 74870 - protein, 51 aa, Homo sapiens
MSSAVGKKVLCCSALISAGMPTTVTTARMPVSCASLHDPARSADHLFFWEL

SEQ ID NO: 74871 - protein, 80 aa, Homo sapiens
MILGFPASRTAFSIFCSLPPVRSLKMKANTTQRLRCQYVLQAALLLGPSYSPASAFQEAETTRTQDCTWLANTIANKKIL

SEQ ID NO: 74872 - protein, 21 aa, Homo sapiens
LLPCIHLFSFLELGLALLPLT

SEQ ID NO: 74873 - protein, 84 aa, Homo sapiens
LDTAGASCLPALALAFPKCTASSAASAASACSPRSWMKWRRDIRSPWLSSTRSCRASERQPSLLLGRLSLSRASSPTQALSSFH

SEQ ID NO: 74874 - protein, 23 aa, Homo sapiens
MGAASQMPLTASSVPTSSTALPI

SEQ ID NO: 74875 - protein, 19 aa, Homo sapiens
IMTFGFVLSSSLLLSQGRS

SEQ ID NO: 74876 - protein, 26 aa, Homo sapiens
MFIILSYSVITLPWHYNVSSTEVLCS

SEQ ID NO: 74877 - protein, 15 aa, Homo sapiens
MLLPGLISIFRFFFF

SEQ ID NO: 74878 - protein, 38 aa, Homo sapiens
VVSSSALFLLYFIHNSQRCWTRMGRPPVAMSPPRCSWG

SEQ ID NO: 74879 - protein, 28 aa, Homo sapiens
LISYYCWGCHLLLQTLSADLSPGPSAEA

SEQ ID NO: 74880 - protein, 32 aa, Homo sapiens
LLHVAFLLLGFCFCSELSCYLFRADVTCRWRV

SEQ ID NO: 74881 - protein, 31 aa, Homo sapiens
MRWDVKPLLITTLLASIAFVLVSNCMVSVDL

SEQ ID NO: 74882 - protein, 55 aa, Homo sapiens
LKLSFSTLLILCFCWSAYHLMASKTNAKFLSDYAVLRDYLKLHSKARYTTNFEME

SEQ ID NO: 74883 - protein, 77 aa, Homo sapiens [sequence omitted]

SEQ ID NO: 74884 - protein, 24 aa, Homo sapiens
MLVSCLCAALQMWRAGAWELWGRR

SEQ ID NO: 74885 - protein, 42 aa, Homo sapiens
LFGQKSKPHLATLAWLQLGTQYLGLQAILSQGPLEILFLMVL

SEQ ID NO: 74886 - protein, 34 aa, Homo sapiens
METPRPPLVLHLLGFPPPLPVPSPSLVQCFRHSG

SEQ ID NO: 74887 - protein, 63 aa, Homo sapiens
LCLPRGRLHKPSCAGLGLPACLPAWPGPSSSLPLPLATASHPGLASLLPALGPRLCPPSPQGR

SEQ ID NO: 74888 - protein, 54 aa, Homo sapiens
MGLSLPALPLGPPLPPAGLSLPQALGIIISPQKRHKNRFWIKEVFLSEMKTVFL

SEQ ID NO: 74889 - protein, 24 aa, Homo sapiens
MCLGRSFSFLRSSAPLATLATPLF

SEQ ID NO: 74890 - protein, 86 aa, Homo sapiens
MCWRKKMTFLTFPGHILLEALHLLELNDCCFPLTLLFIHQTGDAYRLSVKSQSCLGRELLAISVFPFKPDPGDSEILRALLTGSGI

SEQ ID NO: 74891 - protein, 43 aa, Homo sapiens
MPAARAADLAAPAGAALCAAAGTLAPVECPSQLRRNRERRWGT

SEQ ID NO: 74892 - protein, 88 aa, Homo sapiens
MSSRALAGAGCPSQRSAPSSLPEAESWGCWRLDAVSSRGAAFPPAPWAPAAPREPPAGSGARTAPLQGRLPFIPRQRRAAPFPWGSSP

SEQ ID NO: 74893 - protein, 132 aa, Homo sapiens
VTAVSLPRAFLVEKEAGWAWPGTGLSCGRGEGALMCVGSRPEGRAAFACWNPGFCCVLPGVAQVAGAGFAGEPPRPKTVYWRTSWGTGTGGSHLGCLLGAPCVCGKQGGPCACPLCPAHMKCLARDSRPACT

SEQ ID NO: 74894 - protein, 97 aa, Homo sapiens
LRSSHPHIRLFSHASPQGPSVSIACLLLGSSWVQYTRTHTPVSSALCMPFRRPSWKVANRMSILGGSELTGSGQAPGKPGVWEQHPPWVPQSFQQAK

SEQ ID NO: 74895 - protein, 120 aa, Homo sapiens
MQILCNTTACFSFASFQTCHSSTYSLQATYALVAKATQSPSNTNSEEEPLPTPEVATVPSPCPCCWMWWAGSHPHAPLSGPARRLGDPEPVVAAPAAVRRGLLVPQSGRLFPSPCFPQLA

SEQ ID NO: 74896 - protein, 47 aa, Homo sapiens
MAGMRRAEALLSFTAPGFPRVPAHPDARWQMQPHLKDTACWINPSPP

SEQ ID NO: 74897 - protein, 44 aa, Homo sapiens
MTRCFLWLFPAGPLSQRHFPTPNTQWAPPGSVPLRGTLAGARTT

SEQ ID NO: 74898 - protein, 64 aa, Homo sapiens
MSRPGLMLGAWCQGTVEHVAESSSATFGSLSSCHKPAPRTGGPAARAQRERENFQGCIQLHQAQ

SEQ ID NO: 74899 - protein, 86 aa, Homo sapiens [sequence omitted]

SEQ ID NO: 74900 - protein, 36 aa, Homo sapiens
LKTSTPLTCLPLKLLLPWQLAWAQLRNRSQQSTLSR

SEQ ID NO: 74901 - protein, 123 aa, Homo sapiens
LQMLQMSMPRGRFAIPMCSVSMFLLHTLMLLPFLPILEGEKSLEGCPHCVHTTWVRNTIVKTLLYHTYSTGTKLGTCTYNQTTYSVCDPGNNQLYVCYDPKLLPYEFWFEIHIKSEGEKEGEL

SEQ ID NO: 74902 - protein, 36 aa, Homo sapiens
MRCACWKACLLLIENRTGNIPSILCPLVSCCGFGWS

SEQ ID NO: 74903 - protein, 121 aa, Homo sapiens
LLSDRKLGVWPSACLSLSVADSHAAVSVCLRPVHPCCGRLVPSLPSLSSVCCSVGHLPGGPAARHQSDRSYDSLIGDSGWVWILTPGLCLLSQTLICHPHAEPSCHPQKPIRLPPAHGMDF

SEQ ID NO: 74904 - protein, 113 aa, Homo sapiens
LFPASQPLFSVHFLLMGLLPLLGLAAPVLASPRPCLGFLSGLQVGAWLLAPGSLGCLPSPTVLPLCLGPMGAAISPAPGDLPTLASQSAGMTGMSHHTQTRGHISNCILKAWW

SEQ ID NO: 74905 - protein, 66 aa, Homo sapiens
MGLLPLLGLAAPVLASPRPCLGFLSGLQVGAWLLAPGSLGCLPSPTVLPLCLGPMGAAISPAPVLG

SEQ ID NO: 74906 - protein, 70 aa, Homo sapiens
LLMGLLPLLGLAAPVLASPRPCLGFLSGLQVGAWLLAPGSLGCLPSPTVLPLCLGPMGAAISPAPGLFYS

SEQ ID NO: 74907 - protein, 95 aa, Homo sapiens
MVIPSLKSPFLQYTCMCALSLSLSLTHTHTHTHTRARARALLRTEAGGEGFALVSGTGLAGASPLHVSRFSLSVSPLPSQGLSPFHPPRGTSESE

SEQ ID NO: 74908 - protein, 41 aa, Homo sapiens
LNQLKTRKRRRKRKKRKMLGNIYLTCSTARTLASCCYSCKY

SEQ ID NO: 74909 - protein, 29 aa, Homo sapiens
TPRTGPGSSSFAAAATTAATAARGGSSRA

SEQ ID NO: 74910 - protein, 24 aa, Homo sapiens
IGRAVTVVCPGAAGAAAAAGHGAR

SEQ ID NO: 74911 - protein, 34 aa, Homo sapiens
RMKTSMMSHLHLMTVSHWPATCSSLCLPDYNNSM

SEQ ID NO: 74912 - protein, 52 aa, Homo sapiens
LHWHLWISVLMFVLSDLTFYFLSFLEIADCSAPSTDIYINSYSFPLPSLNSF

SEQ ID NO: 74913 - protein, 40 aa, Homo sapiens
LRLQCLMGLPVGGSVFAVPGRSGEPWEEVLRRPSLGSPQD

SEQ ID NO: 74914 - protein, 25 aa, Homo sapiens
MKKTSLIVQFIQIITSMGHFRPLDN

SEQ ID NO: 74915 - protein, 13 aa, Homo sapiens
LDLIIMCNMFIIL

SEQ ID NO: 74916 - protein, 68 aa, Homo sapiens
IWSFFFFNFKILRQALTMLPRWSQTPGFQRCSCLSLPKGWDYRCEPLCPAHLYISFGEYLGSFEGSCI

SEQ ID NO: 74917 - protein, 40 aa, Homo sapiens
KIIRSDVKLASQALITTWPTPWPAPLASAARAALRPLRRS

SEQ ID NO: 74918 - protein, 92 aa, Homo sapiens
TPLPASAAPQRSAPWSTSPRWARLAGAEGSGGTAGCLLALPAHNTSPSRLGSRGPLWDPGHQQLSGNNAKGVPRLLTSEQRFEKDSQAHVFS

SEQ ID NO: 74919 - protein, 44 aa, Homo sapiens
LYPESPVLNVDSIPRAGRKGTERFLSTAIAWTFLLSTPMPNCLP

SEQ ID NO: 74920 - protein, 33 aa, Homo sapiens
MYSGSRPKRNPCLLLELFMTSCSSSWSSSLFLT

SEQ ID NO: 74921 - protein, 37 aa, Homo sapiens
ILSVSLPCLLSFPFPLPVQLDPASGVPGAQHSAGQAD

SEQ ID NO: 74922 - protein, 75 aa, Homo sapiens
MWLPCIFFNFISSLAMYIHPSLSHALCRAFWFQNVPCAFLLWSSLNRMPFLPCLPVDRKILCIGELALTTIFLAC

SEQ ID NO: 74923 - protein, 19 aa, Homo sapiens
RNLLISFVTFGLLLLPHTH

SEQ ID NO: 74924 - protein, 27 aa, Homo sapiens
KIVYLPLLLLSYNAWKQEMGSAAANRT

SEQ ID NO: 74925 - protein, 63 aa, Homo sapiens
MPASTASAAPLLWPLCVPAVSRRGPWQVLSRGRGHGSTGSFSLWAGARPARGLYWGTCLRVLG

SEQ ID NO: 74926 - protein, 35 aa, Homo sapiens
IFKCNLLTYLLFMYLFKHQIFVQEFGKIEDESLIE

SEQ ID NO: 74927 - protein, 20 aa, Homo sapiens
LLHLCYLGTSVILAASTCLS

SEQ ID NO: 74928 - protein, 31 aa, Homo sapiens
LQTMGTLGSLGVTMLHLLFICLGKSCSSHTL

SEQ ID NO: 74929 - protein, 15 aa, Homo sapiens
LLKAMIVFVLLPPTS

SEQ ID NO: 74930 - protein, 26 aa, Homo sapiens
LREGFVLSSVLWCRASSSPAQPRRLN

SEQ ID NO: 74931 - protein, 57 aa, Homo sapiens
IPRRRFSGLGFLPYSLLLPLSGFYRPFAKQLSTQWSFMSSCRKYSSTDVADFAPWQN

SEQ ID NO: 74932 - protein, 71 aa, Homo sapiens
VSVGGTQARTGSQVADGGGWRPRWLSQVVVSFREPISGRPHRGRPRFDGDDARFKWCPCSRVDGWIVHLAF

SEQ ID NO: 74933 - protein, 39 aa, Homo sapiens
LHLSRRLCRHSLPLFRVCVATTAGGIRGVAYRAGPAPQP

SEQ ID NO: 74934 - protein, 23 aa, Homo sapiens
MGFWVGVLVFLCSFKLSPTNRKL

SEQ ID NO: 74935 - protein, 49 aa, Homo sapiens
MLTVLSPPAFGLGFSSLFTCRLSHSLPFPQHHSPRKSQCFPPIILSADP

SEQ ID NO: 74936 - protein, 30 aa, Homo sapiens
IAIKGALTVHSAISLFLCPQIPTTAPRGWA

SEQ ID NO: 74937 - protein, 22 aa, Homo sapiens
TPTFLFALLSLSHILETVFNTH

SEQ ID NO: 74938 - protein, 18 aa, Homo sapiens
IMKFVDTVMILILAMVSQ

SEQ ID NO: 74939 - protein, 32 aa, Homo sapiens
VAGKGLFFHFVRKSTEFLLYLLQLCLQPLTAG

SEQ ID NO: 74940 - protein, 52 aa, Homo sapiens
ISTASSESLLMPTLTLFPSALIATGGHAQHQATSEPRRSSVAFPWPFAIRCL

SEQ ID NO: 74941 - protein, 27 aa, Homo sapiens
MQLKYMLLTFFFFLKSSVDKTRGMWTF

SEQ ID NO: 74942 - protein, 35 aa, Homo sapiens
ISLTTRGTMRRLLPSTWTGSWTSAGSLPWPAGWST

SEQ ID NO: 74943 - protein, 15 aa, Homo sapiens
LHLPAISLPLLLSGV

SEQ ID NO: 74944 - protein, 62 aa, Homo sapiens
MEPWPSLWGWMPHSTASWRLLTMAGAGWSWLPTSACSVLPRWGPSCSMRCAGWPEARQAKLG

SEQ ID NO: 74945 - protein, 20 aa, Homo sapiens
LAVFRAVMFLGYVQDFRVLA

SEQ ID NO: 74946 - protein, 38 aa, Homo sapiens
MLGCLLVVFLCCLILGKLLCKAKNPVNTILSFTGRHYW

SEQ ID NO: 74947 - protein, 59 aa, Homo sapiens
MLVSKNQQKKKLRKLRTNIKKIKFRIRMISLICPFFLWSKTLLNFCKYFDLMCLRSSLF

SEQ ID NO: 74948 - protein, 22 aa, Homo sapiens
IFLFLPIFSFPQIFLLLFYHLE

SEQ ID NO: 74949 - protein, 36 aa, Homo sapiens
LLGVGLAVVVSLTLTAVILVLTRRCRTASHPVSASE

SEQ ID NO: 74950 - protein, 59 aa, Homo sapiens
IPHLGTGIGGLFSKLLVLIAPAFQITSGNLWEEPRGWKMFLSFAKGRKLCHPAGDLSHE

SEQ ID NO: 74951 - protein, 54 aa, Homo sapiens
MQYVLNKYILRQTEQGPSLFCLQLCFLIAAFQNVTLANYQERGTNLRDPDQTAS

SEQ ID NO: 74952 - protein, 58 aa, Homo sapiens
MSLSRAAQGPHSWLLTLASPMAALQTLLLSSPHIRTCCSHSGVLKSMNRYCCIFHNAD

SEQ ID NO: 74953 - protein, 70 aa, Homo sapiens
TARRSAALWAQPAARKAARGSGPVWLGAAAQVVARAVVARSPSRPRAQPQSASSRSGTRPTPVSVPGCAC

SEQ ID NO: 74954 - protein, 62 aa, Homo sapiens
LVATIRKSNTNSNCFLLFTFASLLVELWQVLISNTEHDLPPANVEPGIAASPDSSFIHSDSP

SEQ ID NO: 74955 - protein, 52 aa, Homo sapiens
MARSSLFSGLTIPVHPSPSTWEPQKSNCKLGASRSRLTSTGAWLRVPSWSPK

SEQ ID NO: 74956 - protein, 9 aa, Homo sapiens
LVALITVMI

SEQ ID NO: 74957 - protein, 108 aa, Homo sapiens
LAARLGWDRCGACVVAPLGAGVAAAGTVLRTAEGQAAPAGLVVGAAPAAAAAAWAGEAARTAPDSSWRSGLPTWRRATWRPSVRGTSGTGRTRGCVRRTPGCGSRTGG

SEQ ID NO: 74958 - protein, 65 aa, Homo sapiens
LWWALSPGFLAACCACGSLGTVGLCVCPCVCMCVCMFLSPLDSCTKWLMGTISRQIVKIDRKSFS

SEQ ID NO: 74959 - protein, 56 aa, Homo sapiens
LLLLLLFQEHTLRTIVLLLCTPTHSQLPRKKSTSRAKISVEVLVPYLVQDLPSRIS

SEQ ID NO: 74960 - protein, 76 aa, Homo sapiens
ISVSFIVALLSAREPLAPGRHSCFSAPFLSARWMLMHWRSFSLPLHGACWRRRELCWHEPQFLDWRPSTLLVEALF

SEQ ID NO: 74961 - protein, 26 aa, Homo sapiens
LNIAMKFSFVIGSLGRVSFCSTCCLP

SEQ ID NO: 74962 - protein, 36 aa, Homo sapiens
MAANALPACVLTGASGRLLAGATQRVPACLLHRLQR

SEQ ID NO: 74963 - protein, 43 aa, Homo sapiens
LELFPEHRTKRQESKVVMSLVICLLLKVTSRASSWHCFWNTVT

SEQ ID NO: 74964 - protein, 32 aa, Homo sapiens
KMCEFFSVSIWMCPVLSCVFSALSMVSFSENE

SEQ ID NO: 74965 - protein, 33 aa, Homo sapiens
MARAAAAACGSCSWRCCGHTPATRSRPSAFGPI

SEQ ID NO: 74966 - protein, 33 aa, Homo sapiens
RYKRKITEKKRKEPQRSCSVQSQILLLLLWLIG

SEQ ID NO: 74967 - protein, 71 aa, Homo sapiens
RTEARLVFLQKFPPWAVVEVVTVIVAAPAAATATTRDGGGCSRNCNIPEVFPELLGCPNRRGPPGGVRGAD

SEQ ID NO: 74968 - protein, 35 aa, Homo sapiens
IPKKKKKKKKKKVVTIAFSVSYLFWFAETSPKQEI

SEQ ID NO: 74969 - protein, 27 aa, Homo sapiens
KDSLKFHLLMINTLFGLASFSCMQLDD

SEQ ID NO: 74970 - protein, 17 aa, Homo sapiens
LLLPRLLLLLHLQIGSR

SEQ ID NO: 74971 - protein, 20 aa, Homo sapiens
MGLMGPMLLTAVSLLLWMLE

SEQ ID NO: 74972 - protein, 63 aa, Homo sapiens
MSPSRHMDQAVILLFWQMTLNVYRSFLVLSMETSKSAVWSVLTNKEELQLHMVMLFVYLSPWA

SEQ ID NO: 74973 - protein, 91 aa, Homo sapiens
MKAQMQAKSLEFSAHSKCSMNRLAAVRWGHSLLLSGCLTVPCPCLTGPSISAGELSSADKPAWHGALPLLLVPDPFCPEENFLSPGDAWPR

SEQ ID NO: 74974 - protein, 81 aa, Homo sapiens
RTGLGFHLCVCKCVCACVQVSVCKCVHMCACACMCTCTPMCECVQVCECVQVCVRVSMCVQVCACVRVCACVCSGACGSRV

SEQ ID NO: 74975 - protein, 62 aa, Homo sapiens
LLSSSLLFIFKFLFISPCVTTFFPSAPLPVPLPAPPPPCYPTLETTAVGRVPSSCQPHLLSC

SEQ ID NO: 74976 - protein, 21 aa, Homo sapiens
LHIWLLGFARAFLFCQTSHAG

SEQ ID NO: 74977 - protein, 9 aa, Homo sapiens
LLFIINLLG

SEQ ID NO: 74978 - protein, 53 aa, Homo sapiens
TPATPAALRTVLAVAAAAPVSRWARTQPLGAVAFPASQRQKRGSGTQKVGLRL

SEQ ID NO: 74979 - protein, 80 aa, Homo sapiens
LHPSRHSAVSCLGVAAAMARKALPPTHLGQSWFCSCCRDTELAISALRARTATGSPGSCRCTAGPLPCASALESCCCRVT

SEQ ID NO: 74980 - protein, 33 aa, Homo sapiens
LSHSLFPLLLLPAAQLEPWEAASFSSFSHSVSG

SEQ ID NO: 74981 - protein, 73 aa, Homo sapiens
LSLPGSLSLCLCPRAPPQPLPRSPSRVPFSERSSALRAALSGRPHSSGLPLRAPPDLLGFPLRTPSTLPKGSP

SEQ ID NO: 74982 - protein, 9 aa, Homo sapiens
LVFSLVSFF

SEQ ID NO: 74983 - protein, 28 aa, Homo sapiens
LPLPLILPCLAANPGARADPPLPLPFSR

SEQ ID NO: 74984 - protein, 41 aa, Homo sapiens
TRRKVPSPLATSLPALTAHAVILVTEKLFAWKVPACLPAGP

SEQ ID NO: 74985 - protein, 8 aa, Homo sapiens
VLVTLAFV

SEQ ID NO: 74986 - protein, 64 aa, Homo sapiens
VWLCLSSALLSPPFFLSVPRVRPPPPPRERRRRGSGHSRSYLVVSGCHDLYSTALQRRAQLDQF

SEQ ID NO: 74987 - protein, 52 aa, Homo sapiens
MAASRGGCLQLLQPQWACVTCALLVLLSVGSLCSSAQLDPLPYCKDRGLSVS

SEQ ID NO: 74988 - protein, 54 aa, Homo sapiens
ICLLLILMLPAQQVHQRARMNYGCHECPCEAVGKPWLDCEGYLKSILESTRSSM

SEQ ID NO: 74989 - protein, 13 aa, Homo sapiens
IGLSGLLIPATFW

SEQ ID NO: 74990 - protein, 56 aa, Homo sapiens
MGIGIEQLGGGAAAGVFCPIPLPISSSSLPQTPTSPSSFPSRSPESICLPPLHNNN

SEQ ID NO: 74991 - protein, 46 aa, Homo sapiens
MKDGAPDAAVLLVQPAAPESAASTTARAGGPASAAVGAEQPLLQDV

SEQ ID NO: 74992 - protein, 54 aa, Homo sapiens
MLSLVHLLSPPFSSPLLPTSATATSSESERTAPSAGTEPPTASNLRPRRRQRAQ

SEQ ID NO: 74993 - protein, 46 aa, Homo sapiens
MGALLGAPSPGRGRGRCCCTKVPRTALASLCATSSCTHPSRPCTAA

SEQ ID NO: 74994 - protein, 80 aa, Homo sapiens
MRPKAPAASLLATFPISQRLIPLTPARKHCPSESETSTWVVSKAPATPRTRGAGPTSPPRPTRRRYGVQFAEAVCCGRGV

SEQ ID NO: 74995 - protein, 82 aa, Homo sapiens
MRTSWWWPRVFQTACSPALRQRMRRSWRRAWGWMVPSQPRSLLAAPPGSCRRSVRRMSPRRGGSRGPRPGRRMALWNCQPRA

SEQ ID NO: 74996 - protein, 61 aa, Homo sapiens
MVSGAGVSAVAPLPSPSCMLLPAGNPDDLQCSQGAGSAVQTQGSHGTRRSQELDPKAVRGC

SEQ ID NO: 74997 - protein, 36 aa, Homo sapiens
MISAHCSLRLLGSSDSSASASRVAGTTEMLVISVTC

SEQ ID NO: 74998 - protein, 97 aa, Homo sapiens
IIGVLRKVRLAGTWLWVGWTGCRTECPAVGRSMRQSDAHPGAQHRSNCRRHCLRLCAARGCVPEQEARFLGLELPFLASGKSPRTESKGQILSVSAV

SEQ ID NO: 74999 - protein, 34 aa, Homo sapiens
IIFFLSSSFLTTLIVGRSKCSFILVLVQVQELKT

SEQ ID NO: 75000 - protein, 17 aa, Homo sapiens
ITGMLYWTSLLSSAPAP

SEQ ID NO: 75001 - protein, 32 aa, Homo sapiens
LMLLTTWLLHSHQTRDAILDFPTLICSSPLTL

SEQ ID NO: 75002 - protein, 49 aa, Homo sapiens
VRNFLFLPSLRLQCLMGLPVGGSVFAVPGRSGEPWEEVLRRPSLGSPQD

SEQ ID NO: 75003 - protein, 31 aa, Homo sapiens
KSWLVNLSMLLTEGVLGLFSGRNSMSLKQAF

SEQ ID NO: 75004 - protein, 40 aa, Homo sapiens
KMEPFFLSFFFFKFCIFHPTAVCRENIMQMPLIFYPMFTS

SEQ ID NO: 75005 - protein, 39 aa, Homo sapiens
METSELVLLLLTPHLAPSLPPRVFASICGLALYLGTGSL

SEQ ID NO: 75006 - protein, 98 aa, Homo sapiens
MTVPTPSPTQGLRLPAECLLLLSTHWSLPGPPSRSCWESWRVPFSLHHLQPSQSSGRAPSCLGPAAASAPQCGGWSASWGSTPSASSPRPSSPTRGRW

SEQ ID NO: 75007 - protein, 145 aa, Homo sapiens
MALSPPSPLTRSCALSWPRNGTSPSGALVGRTSASCGLAISMLSLAGTAPWKVAGRWHSKALQRCSCPQTPSLPRPCLRTTTCSVPSFSASISPPCGTTTSTAGTPRAATRSLHFCVKEVKHVLTSRTTWWMKGSTSPLRGTTHA

SEQ ID NO: 75008 - protein, 167 aa, Homo sapiens
MSPSVAQSLSVTLPATPSFSFLPPASLCISPSHPCLLSSLSFSSSPCHASLITPPHSAFPPTHGLLSLSLSLSPPPSFSLSLFLHLLPTPFPLYFYWLLCPLLPSSLPHPGKLLPPILAPAPPGCVLEMGGDVPGSGWEVRAGDQMGEALWTAVAEGLGGNLSPQAV

SEQ ID NO: 75009 - protein, 28 aa, Homo sapiens
MYSLILVCFGIFFCPVFWKGGEAWQRFT

SEQ ID NO: 75010 - protein, 32 aa, Homo sapiens
MPSPPPASAAGGCTHLCPWPAQAHHFLAPSTF

SEQ ID NO: 75011 - protein, 55 aa, Homo sapiens
MTLPLPEFPALFHLIQLQLALRHGLAARRAGPAAGPAAAQRLTVAQHSHSAHRAG

SEQ ID NO: 75012 - protein, 56 aa, Homo sapiens
MTAAWIFTGFWRSSSCSNALRIAATPSSTSPRGRSTRQVMRVHTRPTAWSATAVWA

SEQ ID NO: 75013 - protein, 78 aa, Homo sapiens
MAWTESCTAACAFPSCLVLLYRGRGVPTDLQVPAPLFSTQSKLKRPGESPISKDSCYVRKPPRRAKKRSQGWLFLRDA

SEQ ID NO: 75014 - protein, 53 aa, Homo sapiens
MGTLCTVRSLGGACWCIPAGTGMSSKAGSSSLAPRKDGISSLPSAKTPGGSLG

SEQ ID NO: 75015 - protein, 58 aa, Homo sapiens
MAQSCKDGCGSLISPWLTCVCNAAAVARGKDTASDSNSDSLLQCVTLSQSQISAFSQL

SEQ ID NO: 75016 - protein, 134 aa, Homo sapiens [sequence omitted]

SEQ ID NO: 75017 - protein, 64 aa, Homo sapiens
MRNGGLRSRRKISSPTSPLLQSALLSTRDLQWRPQAAASVFDRPFVSTLPALAGWVRQASPARL

SEQ ID NO: 75018 - protein, 129 aa, Homo sapiens
MGLRQPPSTYWAQAQLLALSCTPNSTQTSTHTHTHTLTHTHTWRARSTSTSTISARRHRICSGHGGAGQTGRLGGWRTELQTKAGDPWRGGMASTPGSLCVRHSPWTHTHRHTHCLDACMHTHARTRAP

SEQ ID NO: 75019 - protein, 32 aa, Homo sapiens
MASLSLQIISFNSLIAPVSLDGFLLPTTKNPN

SEQ ID NO: 75020 - protein, 53 aa, Homo sapiens
MFLLRSSSSFPALLLPLQISPPSASDWIKGNHFSKGSLALSFQAILQPPEPST

SEQ ID NO: 75021 - protein, 50 aa, Homo sapiens
MKGLVKGLQGDGLGGRRFLFLLPFCLCSPNVPVSPLPHLGPLFGPCGQSC

SEQ ID NO: 75022 - protein, 57 aa, Homo sapiens
MAGLLFSALSFIIPAGQNYKYRNLSLGRSASWLLHVSFQISSSPISLQTSKEVYKGT

SEQ ID NO: 75023 - protein, 32 aa, Homo sapiens
IDTLKVLHMIRKQLWKMTAFISLNILPYGTDQ

SEQ ID NO: 75024 - protein, 34 aa, Homo sapiens
MDYRVLEKSVFHGVCLHLLTSQVLKQKTKAMILM

SEQ ID NO: 75025 - protein, 33 aa, Homo sapiens
MSLLKAVPCFQAARLAFLCSRGLQVFLSVAAEL

SEQ ID NO: 75026 - protein, 36 aa, Homo sapiens
MSPPAAAAAASASRARAPASRSRSRCLGHWPPDPRL

SEQ ID NO: 75027 - protein, 29 aa, Homo sapiens
LSLPASTLAAACQSSAASPSPTTEARGRQ

SEQ ID NO: 75028 - protein, 37 aa, Homo sapiens
MSFIFISSFFLMVKPCENELQYYSFNSHGHSHSEERS

SEQ ID NO: 75029 - protein, 42 aa, Homo sapiens
VSSWCTCLWALPSALPGGPARALCAQDAPASRRGPAPAQTGR

SEQ ID NO: 75030 - protein, 49 aa, Homo sapiens
RVLKLSSLWGCVFLVPGSPRLPRRTWKRKEQSLQRLQREDKKRLHLGEF

SEQ ID NO: 75031 - protein, 107 aa, Homo sapiens
TRARRRRKRRTWSPRRRRRRTATPRRPRILRTTRRMRWKRTTMTPIIRRRWKTTTTTPVTARKAASGAIVPTAALQVGENQEYIGLVLLYWKKKTSRPLNFPSPLRI

SEQ ID NO: 75032 - protein, 22 aa, Homo sapiens
IMKFIHDLDRTERRQMEVTQLV

SEQ ID NO: 75033 - protein, 44 aa, Homo sapiens
RHPLKYFLQGFPFVRVSSSLTGLSGGAAGSALRNSGKWTPFSCP

SEQ ID NO: 75034 - protein, 62 aa, Homo sapiens
KGLLPPLPAAGFHLARACCFLRARPLPPVLLFVPFCFPHSLPQLIARHLGPCPHSPSTLQGT

SEQ ID NO: 75035 - protein, 41 aa, Homo sapiens
MYRCALCVQSFTLTTSLCHLAEVVWFTITAISAFLSGKPEA

SEQ ID NO: 75036 - protein, 45 aa, Homo sapiens
KFSGSPEISRVTFVRPANLIKILLESALLVSYLCQISSWETAVTT

SEQ ID NO: 75037 - protein, 32 aa, Homo sapiens
KTSMMSHLHLMTVSHWPATCSSLCLPDYNNSM

SEQ ID NO: 75038 - protein, 63 aa, Homo sapiens
LCPFLASLAACTSRLVGRTVGRACGSPPRPPRGLGPAAASSTAAGWESPRDAASGPAPGLCPH

SEQ ID NO: 75039 - protein, 399 aa, Homo sapiens
KGQADFFFLLVSEAVVATGSPRAWLTCLILPLPGIIFSVLPKAMSRPLLITFTPATDPSDLWKDGQQQPQPEKPESTLDGAAARAFYEALIGDESSAPDSQRSQTEPARERKRKKRRIMKAPAAEAVAEGASGRHGQGRSLEAEDKMTHRILRAAQEGDLPELRRLLEPHEAGGAGGNINARDAFWWTPLMCAARAGQGAAVSYLLGRGAAWVGVCELSGRDAAQLAEEAGFPEVARMVRESHGETRSPENRSPTPSLQYCENCDTHFQDSNHRTSTAHLLSLSQGPQPPNLPLGVPISSPGFKLLLRGGWEPGMGLGPRGEGRANPIPTVLKRDQEGLGYRSAPQPRVTHFPAWDTRAVAGRERPPRVATLSWREERRREEKDRAWERDLRTYMNLEF

SEQ ID NO: 75040 - protein, 56 aa, Homo sapiens
MQSGPLWSGFWAPRLPGSLPFCSHLHLSSALPECWPRPAWGKAVGIVLAPSSSSPF

SEQ ID NO: 75041 - protein, 97 aa, Homo sapiens
MRRLLSGCGWRWSEAWCSSLVSFCLSLSSLGPPARGTVITSPREVVRAARRWAAGSPGGRAGGAETSAGLMSALSARGPSLPVRAGHCRMAPLLCGC

SEQ ID NO: 75042 - protein, 51 aa, Homo sapiens
MIIWINYRLLAGLSVIIHDSGLGKRPTAYVPKKGQSLMELGGLFYAICLHT

SEQ ID NO: 75043 - protein, 56 aa, Homo sapiens
MRVRTALRAERLSSLLVYWVGGGTSRTKPSRRTLARTQLMDASKLTYIYIQKCFAT

SEQ ID NO: 75044 - protein, 45 aa, Homo sapiens
MFSLKGRTLQLLFRISKLPASPLLHSKPLLSKVKNTNTVILLHLI

SEQ ID NO: 75045 - protein, 87 aa, Homo sapiens
MSEKNSSFRSSTILRLLTCFGSKSSRFAILDMNPLKLIGFISIFFKFVACPVTFYCVEVLNFNLKKFKIFSFLFVLLVSYLGNPSLP

SEQ ID NO: 75046 - protein, 59 aa, Homo sapiens
MWIKPSVAFAASPLCFGLWEPRRKPSPLQMRPQLLHSEQSLLTLSANSSESTPISSGES

SEQ ID NO: 75047 - protein, 62 aa, Homo sapiens
MTRCVHLGISTTSLTNIACATPSPATPEPRRGALSSAPACPMDTPVPAMTSQGPEELSREQL

SEQ ID NO: 75048 - protein, 66 aa, Homo sapiens
MFQRSSLLPRLLVSAGMIHRPGGAARAAAAAAARAPPEPARRRGRGLGGKSRGPRARRLFLLQPYC

SEQ ID NO: 75049 - protein, 29 aa, Homo sapiens
MRSAVPATWTAASPAWSLLPRPPEPRAGA

SEQ ID NO: 75050 - protein, 105 aa, Homo sapiens
MSTSISPLYPSLLVWISRYTTASSCSPSLGAGPAGTPRRSPSTVAAAPQRWPPPLTLRWHTSPYPPESPSTCCLYRQALGSWPLALCLQHCHLHVDWEPHSPRTC

SEQ ID NO: 75051 - protein, 49 aa, Homo sapiens
MRLSLFFSLSLPSLSIPSFLPPSPSPSHYSVSYPCQFPRVSFFPSSYCV

SEQ ID NO: 75052 - protein, 23 aa, Homo sapiens
MVLLCCQSGLKLLALSDSLTSDS

SEQ ID NO: 75053 - protein, 66 aa, Homo sapiens
VGPEGTSRFFTPHGPHVSVSGTSRFFTLHGSHVSVSGPLFPYMHCRPAPPSSAPENGGKVSGLGAR

SEQ ID NO: 75054 - protein, 33 aa, Homo sapiens
MSSFFHLLCSCCTATAQYIIFQETLLYEGLHNS

SEQ ID NO: 75055 - protein, 40 aa, Homo sapiens
MYLQLASNALCAPGWSRCAEGENPALGPSHLLPYLARLST

SEQ ID NO: 75056 - protein, 33 aa, Homo sapiens
MRSTLISSLDSLLPVIPHRTEAEWVVVMFDRRH

SEQ ID NO: 75057 - protein, 65 aa, Homo sapiens
MQFWECSGSLCSFLSCKPWAPLGPLGSLCYTCFLSVWARAAQATPCDTEISYENTQPACSPPGRC

SEQ ID NO: 75058 - protein, 61 aa, Homo sapiens
MQFWECSGSLCSFLSCKPWAPLGPLGSLCYTCFLSVWARAAQATPCDTEEDSTLHSHLLCS

SEQ ID NO: 75059 - protein, 37 aa, Homo sapiens
MPPTLIPRELRCFLLPWPLDPAIASIPGHLAEAGNSG

SEQ ID NO: 75060 - protein, 93 aa, Homo sapiens
LPFPFHSSFLESDIRKPARRKIQTTNPDFLLLLFMSVPVVSAPPFCPPAEGSRDGRPKASVARPAAVHEHHSPRDCGHLPDVLRSSLGGWQPH

SEQ ID NO: 75061 - protein, 69 aa, Homo sapiens
KAGSQWKKRSPRWSLTMAPACAKLVLLGTTLPEPCFLPSSGAPDTRASWWAWARRTPTWATRPRASVAS

SEQ ID NO: 75062 - protein, 52 aa, Homo sapiens
MVLESTPFTTAWLQKCRKSTGLRKDTALLVLPCTILPMTRGLASYCILRTSS

SEQ ID NO: 75063 - protein, 63 aa, Homo sapiens
MLQPRRPRLLREVPGTPRHHLALAPGCLLLESRGAPSPSLPNPRRLTSLSLRVAFAIREPVDP

SEQ ID NO: 75064 - protein, 125 aa, Homo sapiens [sequence omitted]

SEQ ID NO: 75065 - protein, 38 aa, Homo sapiens
KLGRMTQSGRRGLGLQVSALASVGPHSFASFAPCLSFL

SEQ ID NO: 75066 - protein, 56 aa, Homo sapiens
KLGFEGAILRSVLLSLYICLISWVHGKHESVGTWDKKKTRHLHKENQVLKKVSSQL

SEQ ID NO: 75067 - protein, 33 aa, Homo sapiens
LDRLFSLLLPVGLFLKRMAELPTCSNTIRTKVA

SEQ ID NO: 75068 - protein, 70 aa, Homo sapiens
LAPGGSSSSLHICFFLMKLLLVGNLSNFISYETHVVEHRDASPAGRVMRRRAWLWSAGNLRNCQGPRAQP

SEQ ID NO: 75069 - protein, 59 aa, Homo sapiens
KSNIKICLLLILMLPAQQVHQRARMNYGCHECPCEAVGKPWLDCEGYLKSILESTRSSM

SEQ ID NO: 75070 - protein, 34 aa, Homo sapiens
MTQSGRRGLGLQVSALASVGPHSFASFAPCLSFL

SEQ ID NO: 75071 - protein, 51 aa, Homo sapiens
RAAGAEATAAAAAGGAIAAAVAATGRGAAVGDRGRGCRRRSGWLANTWCHM

SEQ ID NO: 75072 - protein, 128 aa, Homo sapiens
VNICGCPLLFFLLFQLLLLLPLPSRSRKPPTQLTLAQLQTVSSAQLYLAPRAPLRHWTHRRVFYFLQSCIAVHIFVPATSLCLWSALQPRKLLLELRPSAPAGQWRSPPSSRAQPLLLWADDAEDALL

SEQ ID NO: 75073 - protein, 63 aa, Homo sapiens [sequence omitted]

SEQ ID NO: 75074 - protein, 38 aa, Homo sapiens [sequence omitted]

SEQ ID NO: 75075 - protein, 38 aa, Homo sapiens
LCYSFALLSLSLELKASWSEARTIIPSLSTLISGCSNE

SEQ ID NO: 75076 - protein, 33 aa, Homo sapiens
LCPHQMLNLLSTLIFHFTFIRTTGAVAEMSHGR

SEQ ID NO: 75077 - protein, 63 aa, Homo sapiens
LLLRYGKVFSRLLRPECHYHMTKALPQFIFLPVYFPFAFLESCCITEAGSSDVPLKSQWKVLT

SEQ ID NO: 75078 - protein, 22 aa, Homo sapiens
MLLLGLEGLLFMLFNALSNVFF

SEQ ID NO: 75079 - protein, 33 aa, Homo sapiens
MIFFSLTNFLFIFAGTLFLFQTPNSSFIHAIYA

SEQ ID NO: 75080 - protein, 101 aa, Homo sapiens
LLRASALAFSLSGFSGSRWCYTARIDIFRERDIFKTKPTISCPLTPQNPLPEEERSLGRSGRAPSAGLFAEAAPLTVGPALRCVHIRLFPILLFFRFSTCK

SEQ ID NO: 75081 - protein, 44 aa, Homo sapiens
LGLRVLTRGRAGRLGVPHLLALPSLPSPALQSQPSWVPATTAAG

SEQ ID NO: 75082 - protein, 78 aa, Homo sapiens
LLLLMQSRPVASHDTPCLLCCFLLASFLRGEGTELSRWEDFSFLSVFRSRVGWGGRLGIRDHITLNGCYLNNYFLVWL

SEQ ID NO: 75083 - protein, 55 aa, Homo sapiens
LPCLAVFHGLPSAPLLFPSTQPASSVFQAQLGVSSGKPVWMPLTPDWFGNPQCST

SEQ ID NO: 75084 - protein, 107 aa, Homo sapiens
MRAVDYFLSLLHLPHTRAAFCSSFCQVPRSLETSLLLVWIPELLSEARGKYLSAENAKTNHLTMAILLSMVIPTLMVPRWLQQFQPCYPNPPTSGGICLFNLHLLQM

SEQ ID NO: 75085 - protein, 29 aa, Homo sapiens
MQWTAPLACSTRVILQSLSALDNGTLSQK

SEQ ID NO: 75086 - protein, 49 aa, Homo sapiens
MSYWARRCPLLRRTVHTMVVVRLSPVLRMPIGMGEACLACGASQWPSSH

SEQ ID NO: 75087 - protein, 32 aa, Homo sapiens
LEAETSWSLLGLLGAHTEAAHSQTPEPQRPPS

SEQ ID NO: 75088 - protein, 85 aa, Homo sapiens
MLKTLWQSILARTSQGAKTRGTHGQTTDRRRTGRWTPLPPPSPRHLRPEDEPSLQGHGCGAPRQRRPSGALCPPGRGALMRAPLQ

SEQ ID NO: 75089 - protein, 42 aa, Homo sapiens
LGAEPAEALSRAAPGRTAGAGWAGPGMAVALAPVPVAPRASS

SEQ ID NO: 75090 - protein, 41 aa, Homo sapiens
LGAEPAEALSRAAPGRTAGAGWAGPGMAVALAPVPVAPRAR

SEQ ID NO: 75091 - protein, 65 aa, Homo sapiens
VPASFAAASAVLSAVMPSSSRCGDTTTEESLLQGLGTLLDPFLGFRGCGDQEKVRIPKSLPCLDG

SEQ ID NO: 75092 - protein, 52 aa, Homo sapiens
VRAAGAEATAAAAAGGAIAAAVAATGRGAAVGDRGRGCRRRSGWLANTWCHM

SEQ ID NO: 75093 - protein, 48 aa, Homo sapiens
VRAAGAEATAAAAAGGAIAAAVAATGRGAAVGDRGRGCRRRSGWVAHI

SEQ ID NO: 75094 - protein, 31 aa, Homo sapiens
RCSWASVLPLCSPWASPTSTTTCGGRTPRSI

SEQ ID NO: 75095 - protein, 71 aa, Homo sapiens
MCVRPARGRPGFASTSALASARASTRASEELPRRPARRAGKEIINLPLNEKNFLKAAYTPRKKPQMFFCFA

SEQ ID NO: 75096 - protein, 49 aa, Homo sapiens [sequence omitted]

SEQ ID NO: 75097 - protein, 30 aa, Homo sapiens
MVLLTFWKVSLSSSGRISISLSNSHLPFSP

SEQ ID NO: 75098 - protein, 75 aa, Homo sapiens
MSLRKMKAVVARTGAAAVSGEGRRMQRPPAWSAGPGAATRAGRGGSTPWAPHSPPQVLRMASRETRKWTPWLLES

SEQ ID NO: 75099 - protein, 46 aa, Homo sapiens
MNENGKFPGLPSAQLSCLPPFASAAHASLSSVFCAWTLWAHPGHGG

SEQ ID NO: 75100 - protein, 27 aa, Homo sapiens
MPPLSCSLATFLSEARGASWTMQMNFG

SEQ ID NO: 75101 - protein, 46 aa, Homo sapiens
MNPHFKSSCLLEVALPVTSLHFSIHGCYSRKSSFLKHISRHMMRLM

SEQ ID NO: 75102 - protein, 36 aa, Homo sapiens
LRRLVTRLSTSLLPPPPGVALAGDVVSVMAAARPGR

SEQ ID NO: 75103 - protein, 60 aa, Homo sapiens
RCGTHWLPTKAPIRRLPHCKTTWLSLCTAMSPLTTEIWALRRGNSSASWSRAASGGRRSP

SEQ ID NO: 75104 - protein, 45 aa, Homo sapiens
LAAAVSLRRSRMRPAAVAPASAGAAAAEAAAEAAATAAPPPADLD

SEQ ID NO: 75105 - protein, 55 aa, Homo sapiens
MTSFKTAKKMNRERKLKLSKRQQIDGILLCCLGWSPSLKRSSFLGLPKQWDYRAW

SEQ ID NO: 75106 - protein, 37 aa, Homo sapiens
MVWPRAKSHLCSSSCSSPLSSRTAWGELVSKSLARVS

SEQ ID NO: 75107 - protein, 26 aa, Homo sapiens
MTKNVLKNMTFYKMAVIICLHLMHVF

SEQ ID NO: 75108 - protein, 34 aa, Homo sapiens
LRVCVCMCVCMCVRACVRVCARASVWTRRWGQLS

SEQ ID NO: 75109 - protein, 34 aa, Homo sapiens
ITQSAVIVISMASSLHSSSCFQPPKPEHCLASNH

SEQ ID NO: 75110 - protein, 45 aa, Homo sapiens
RLPKLAGHFAAVCGGAASGMPKPKAGRGINYKWSRLHPFEPRTCL

SEQ ID NO: 75111 - protein, 82 aa, Homo sapiens
LARPLAPSLLPLSLLPVPSPSLTSFLPTSPLLGFLPHPLDSPLPALALSLALSAAPAMTEAGAGAVAAAAVAGGESGSQKVA

SEQ ID NO: 75112 - protein, 30 aa, Homo sapiens
ILTTLLLCSLGMLLCLCIWSLFGATVDRHL

SEQ ID NO: 75113 - protein, 23 aa, Homo sapiens
MPCTGLAASVSPVSSQDGPDSLR

SEQ ID NO: 75114 - protein, 25 aa, Homo sapiens
VRLVALTSAALPLLPRPRPSPCDRS

SEQ ID NO: 75115 - protein, 49 aa, Homo sapiens
RTLNRRISHLQGTLPFILHFVTNLQNSINWVGFHPFLAKFLKLNPLVRV

SEQ ID NO: 75116 - protein, 42 aa, Homo sapiens
LFWKMWTSTKWFHWKQIVVLTMHPFPQALNSQQVPTRMMMSS

SEQ ID NO: 75117 - protein, 46 aa, Homo sapiens
LISHLLSPITSILFPPVSPSPPQFPPCPSFPPSSPSPGHFANLWLL

SEQ ID NO: 75118 - protein, 45 aa, Homo sapiens
VALVAAAAAAAAALERFLSGSAGGPPGWSTCKSRSGAPGIDGDEL

SEQ ID NO: 75119 - protein, 56 aa, Homo sapiens
LRNPARKDIGGGLALKLLFKTRKRRRKRKKRKMLGNIYLTCSTARTLASCCYSCKY

SEQ ID NO: 75120 - protein, 26 aa, Homo sapiens
VYFSLSLMSCTIADLSTMSADCVEKL

SEQ ID NO: 75121 - protein, 106 aa, Homo sapiens
MPRLSLVVLLLSILDGAPGHHFRLSEYCKKQAQTSPKQSCHTWIGLFLIRKSSWSLLNLAATWNMISLVLNYFITNSAQILTCLMITKELEGCVSWWKRAVKIEFW

SEQ ID NO: 75122 - protein, 26 aa, Homo sapiens
LRPKRRSVAGVVAAAATVSWGPRAAL

SEQ ID NO: 75123 - protein, 29 aa, Homo sapiens
LQFLAYLCSLILSCLFVVLKGRSFVLWVC

SEQ ID NO: 75124 - protein, 47 aa, Homo sapiens
TEAVAGFPCPRRMGNSRGAAAWGLKGAASATAMAAGSSRRLQLLLAQ

SEQ ID NO: 75125 - protein, 46 aa, Homo sapiens
MAAARLARAAPAAAGAALHAAGGRLPLPGGGGHHLLGHSQGGIHRD

SEQ ID NO: 75126 - protein, 38 aa, Homo sapiens
MMSPSAACPVLGQSCPPRCPSAMRTSWTLWSRAAPVPL

SEQ ID NO: 75127 - protein, 34 aa, Homo sapiens
MPRPRACASWPLLAAVSGLRGLEWPPSWRRWWQQ

SEQ ID NO: 75128 - protein, 81 aa, Homo sapiens
MGRPLLAVCMLRIPVVSAQQLDISAKIPLYSLTCKALAPLYSISLVPVFPPYKHCVFEELKIHSERCYQNLDDTCSSQRHL

SEQ ID NO: 75129 - protein, 45 aa, Homo sapiens
MPVGIFCHMACTIPSRAAGGREIWMAQRTGCTTEFLTRRRTCFLT

SEQ ID NO: 75130 - protein, 22 aa, Homo sapiens
MNLPGTAAAADLLAIFSQSAPC

SEQ ID NO: 75131 - protein, 33 aa, Homo sapiens [sequence omitted]

SEQ ID NO: 75132 - protein, 61 aa, Homo sapiens
LSQSGVLAPLLSSSPSEPASPSAPLLPRLCTLFVVGWPKGMSCFHQRHSAKGKLRHWKERE

SEQ ID NO: 75133 - protein, 26 aa, Homo sapiens
TRRTGSSLTFWMSLSSTRSVRRPVGG

SEQ ID NO: 75134 - protein, 38 aa, Homo sapiens
LSPVPQQQVVLIALFVQCFGLGPSAFPRSSTLHPAQPC

SEQ ID NO: 75135 - protein, 10 aa, Homo sapiens
LSLDKIEKNS

SEQ ID NO: 75136 - protein, 16 aa, Homo sapiens
MPWPERATRRRRPSVP

SEQ ID NO: 75137 - protein, 22 aa, Homo sapiens
KNFLHQIFIFLSLPSRATCTSY

SEQ ID NO: 75138 - protein, 26 aa, Homo sapiens
RFYRITLTKVPWSFMSQHILLFLFLQ

SEQ ID NO: 75139 - protein, 24 aa, Homo sapiens
LPQGEDGGRRENFAGTAGKGQRES

SEQ ID NO: 75140 - protein, 23 aa, Homo sapiens
VAPPEQPFLVWSGQLPARKMVRL

SEQ ID NO: 75141 - protein, 23 aa, Homo sapiens
LCMLLTVSLFSSQLRVKISPSGQ

SEQ ID NO: 75142 - protein, 22 aa, Homo sapiens
RCWEDRKYKESYSVPCPCCFFT

SEQ ID NO: 75143 - protein, 42 aa, Homo sapiens
MRKGCRKFCCLHMWLQLRHWSSPASPEGLKNKYEFRFHTSIN

SEQ ID NO: 75144 - protein, 70 aa, Homo sapiens
MPLDAILGVLLFGCHGQYYQAEPILRYPSHQTRKRVRLREETTGNGAAAGLSSRNEDRDEARSTHQLPPA

SEQ ID NO: 75145 - protein, 30 aa, Homo sapiens
LSLVQCLVLFAGVSPPGFACPRERHWRSVT

SEQ ID NO: 75146 - protein, 71 aa, Homo sapiens
LLSPCLGTAGTCLATSSGGPRPPSSSLPSFLLPCPISAAPRSLRRAPWLLGRAVVGWPRPTPYGGGSSPPF

SEQ ID NO: 75147 - protein, 47 aa, Homo sapiens
MTRPFFAVSGRALWSRPQAACVGRLVWRTSPRLTCKDDAERNNKAYL

SEQ ID NO: 75148 - protein, 39 aa, Homo sapiens
MIPESKREELGFANLVALSVSCFSKAAVQKERRYQEGTC

SEQ ID NO: 75149 - protein, 39 aa, Homo sapiens
ILLDKWTSIYCAFTAAITIASSKTVSSAPSSGWMGNCSC

SEQ ID NO: 75150 - protein, 72 aa, Homo sapiens
LWRTRLGVRVQAGSWASPSTCASLGPWFCLAWGSSSSQVASQSLRLGPWRKWSGRSSQTPRCWKLWGTGRMG

SEQ ID NO: 75151 - protein, 58 aa, Homo sapiens
LSPALLGSSGRKHVLQRLGFVSGSGIATAASVTPGDQHSRSLGTYDRGLRQQRDSEHL

SEQ ID NO: 75152 - protein, 61 aa, Homo sapiens
MRSTLAASIPTISSQGSSGHPFTKDWIVLWKSVLYMGITPSSFRFTQKRGSTVMGNWAMNQ

SEQ ID NO: 75153 - protein, 24 aa, Homo sapiens
MKLTACWLSVDWPGAVLQDPCELP

SEQ ID NO: 75154 - protein, 25 aa, Homo sapiens
TKFRSRSLTSGLFAGGVGAEPDWSG

SEQ ID NO: 75155 - protein, 33 aa, Homo sapiens
VLNDNTGWSGSENTLRLLIIPICQLTAVGKKTL

SEQ ID NO: 75156 - protein, 31 aa, Homo sapiens
RHLLLFLLWQMLFLQLWCPQPPARALLLLFL

SEQ ID NO: 75157 - protein, 26 aa, Homo sapiens
LLLLTLWVRTAFVSCNTHGEGLQVHF

SEQ ID NO: 75158 - protein, 23 aa, Homo sapiens
LLTPAPSTLPLAASAAVAAGGAV

SEQ ID NO: 75159 - protein, 34 aa, Homo sapiens
MWWKTPCWWTPSTTATSSSAEARSCGRLLKSMAG

SEQ ID NO: 75160 - protein, 32 aa, Homo sapiens
VVSRVWLPACLRGLFPPSSARASTSCSWGQIA

SEQ ID NO: 75161 - protein, 38 aa, Homo sapiens
ILCEKPQRRLFSRALASSSASSFASSCLLPASAAATPA

SEQ ID NO: 75162 - protein, 34 aa, Homo sapiens
LWGRTPGGSARPWRQETALLRFCLGSLLFALDGS

SEQ ID NO: 75163 - protein, 23 aa, Homo sapiens
MGHTAVLQIFSLISLKATQQLFM

SEQ ID NO: 75164 - protein, 29 aa, Homo sapiens
MSLWAMMKGASLLSLVGRNLPCPWMPMER

SEQ ID NO: 75165 - protein, 99 aa, Homo sapiens
ITCSIGWLRSSQKKMLSLFPQLSLCAVAPFSSSNSRTLMISQNRSTSFFASGKNRFQLSPTNFASWLDISARLAGVILQKSSNSSGKIKCSLNHSSVLM

SEQ ID NO: 75166 - protein, 37 aa, Homo sapiens
KKCSLMLVSVIFVRPKKPISWDTWFIGYFWQLWVEEN

SEQ ID NO: 75167 - protein, 42 aa, Homo sapiens
RALKHCQMIRQKLLFMLLSVRQMVLQEEFQLQRYMPILNKPI

SEQ ID NO: 75168 - protein, 17 aa, Homo sapiens
KCASERKKTQTFSHCIR

SEQ ID NO: 75169 - protein, 50 aa, Homo sapiens
MESNGSIMKIMSQKMWVLCVALIYQDKRDMLPLVHLCSLFLSCSFNKCYL

SEQ ID NO: 75170 - protein, 27 aa, Homo sapiens
MLSRVVSKLLSSSDLPASASQSAEITE

SEQ ID NO: 75171 - protein, 78 aa, Homo sapiens
LLLLRLAGISAGAAAAAAAYAPWSIASWGPGRTELPGCGMRPWSFFVLRCRYGNIAVVSRAMSIVSQRPKLWIGCMSC

SEQ ID NO: 75172 - protein, 243 aa, Homo sapiens
MLLSLLGACAVVGPFHGPEWEPVQGLLSQNHSCRDPQCCGNLLVLCLFLVWQVRHCWHQVTRTRFSTRNVIKVPLQKRAVPSMRCETVFKLTPEFFSPGKSRGLDSQQCAQRQRWGYRRSLQESWAQNLLSPQHPCPGPPSGVHTHSEPIFCTTSISNTCLLPQNSSWKAWQVPWCLHDGQTRPALDMCQEMEQLLLHSQERLVSLEPVISVRSRPTSMTLTTSLPNLLSAERLQFCPQRAPA

SEQ ID NO: 75173 - protein, 83 aa, Homo sapiens
IPTRRFLGRGPNKKREEMEITSPDLAFLSLFLFSPLPSDDWRVKGNPERGGEQRFEKMQECVWRRVKLPFKLWPPGTRCSAAG

SEQ ID NO: 75174 - protein, 102 aa, Homo sapiens
LRHHPCHCRALAALLTAWSHALRRATGGRWVTSIRAAAARRREKASKKEEWEEEGKRRRRKRRRRKRGAQRIQVSRREVNTKNHVCRAAGPVHDPGFGVGHL

SEQ ID NO: 75175 - protein, 52 aa, Homo sapiens
RLDMLTVLSPPAFGLGFSSLFTCRLSHSLPFPQHHSPRKSQCFPPIILSADP

SEQ ID NO: 75176 - protein, 52 aa, Homo sapiens
MLTSASWQSTWSPSHVSISLCLALPLSPAVEASSIELSQCRNSPSRSSMPRT

SEQ ID NO: 75177 - protein, 24 aa, Homo sapiens
TVTAIASCMPLLSTCGAFRTQTWY

SEQ ID NO: 75178 - protein, 51 aa, Homo sapiens
MGSQSQKVFLRPASSPRVIIPSSRSVTSPSSLLLMRFMTARWSTGAWTSLF

SEQ ID NO: 75179 - protein, 25 aa, Homo sapiens
MEKQSLCICSLLVLGFWLLLAFINS

SEQ ID NO: 75180 - protein, 68 aa, Homo sapiens
IAPTFPSALFSPGRAAAAAAAAAAAGGGARWRRWPGSPWRTVKEAAKKKSATTTTVILEIIIMDRVIP

SEQ ID NO: 75181 - protein, 35 aa, Homo sapiens
KKSRSVRRRRLGKVFLCLGSMEAASRHLPATLMLL

SEQ ID NO: 75182 - protein, 43 aa, Homo sapiens
KDRVPSGRSHAAAASGALGAADWLAVQILLNPLVKTETQNGCK

SEQ ID NO: 75183 - protein, 36 aa, Homo sapiens
KDRVPSGRSHAAAASGALGAADWLAVQGADFKSKRR

SEQ ID NO: 75184 - protein, 23 aa, Homo sapiens
VAPWALLAAALASESPARTSAAS

SEQ ID NO: 75185 - protein, 36 aa, Homo sapiens
RTAGSPCRLRQMTMAASPWTVTCSVGSATLLEPRPE

SEQ ID NO: 75186 - protein, 23 aa, Homo sapiens
MSKLCPILWILMKLGCSKDLKEN

SEQ ID NO: 75187 - protein, 79 aa, Homo sapiens
MYRSSPSPASCACASSLPPSCRPSSSTCGSATRTPAPAAPCSCWPRQSRTWATWTRRLPGPRRLGWSRCSPPCARAWRS

SEQ ID NO: 75188 - protein, 27 aa, Homo sapiens
LNARPLIPFFPPLSLGLLIKARPFPQP

SEQ ID NO: 75189 - protein, 39 aa, Homo sapiens
RHRAAAPGRGAGVDPAAGRDGAGGAAAAAAGGGAGPAAA

SEQ ID NO: 75190 - protein, 63 aa, Homo sapiens
MKLLVCFQSSTMARSSLFSGLTIPVHPSPSTWEPQKSNCKLGASRSRLTSTGAWLRVPSWSPK

SEQ ID NO: 75191 - protein, 53 aa, Homo sapiens
MARSSLFSGLTIPVHPSPSTWEPQKSNCKLGASSRSRLTSTGAWLRVPSWSPK

SEQ ID NO: 75192 - protein, 30 aa, Homo sapiens
ILHFSRMNPRSIPWTLLTLSKASTVPTRLR

SEQ ID NO: 75193 - protein, 67 aa, Homo sapiens
TGSGRLLSRSRQRLEARGRSPASGRSAAAPLPCALFPAGPERPPPPPGGSRAKGSREAGPGEELACS

SEQ ID NO: 75194 - protein, 46 aa, Homo sapiens
MRTRLEKAPTLQTGGSCPSCSLSLASLRLKWQLIGFILWCLAWSSL

SEQ ID NO: 75195 - protein, 26 aa, Homo sapiens
KPSRAAGVALIAGGATSWPWMSRTPL

SEQ ID NO: 75196 - protein, 32 aa, Homo sapiens
INSLCTFSFPSCLFFFVVLYSCCLSTMCQTLC

SEQ ID NO: 75197 - protein, 36 aa, Homo sapiens
LKMMIMAHQLLLTHLVISQKENLKSIRGQSNVNNKA

SEQ ID NO: 75198 - protein, 40 aa, Homo sapiens
MRRRGALCAGTTAVFRRWRWTQAAWTTVAGRMGSVYGQLP

SEQ ID NO: 75199 - protein, 27 aa, Homo sapiens
VRRLGPFLVFSPRVLLCHPGWSAMASS

SEQ ID NO: 75200 - protein, 22 aa, Homo sapiens
MTVCLYLTVSCFSNSMGLLSNR

SEQ ID NO: 75201 - protein, 53 aa, Homo sapiens
VCVLILAIGARACEPVGVAAAGTIGLSRGRHVAFRGAFMGLSGMGFLFLIVNR

SEQ ID NO: 75202 - protein, 32 aa, Homo sapiens
VRGRNELGAAAVAAGAVRAAPALGAAAALPEG

SEQ ID NO: 75203 - protein, 37 aa, Homo sapiens
RSFLFVPCWKEAAVLRAQVVVFSSLEAMAHLHFCALS

SEQ ID NO: 75204 - protein, 50 aa, Homo sapiens
VLFPLCFSPVLGQSCPRSRVGLRVCAGAAGAISPLGGRWSPGARGRDHGG

SEQ ID NO: 75205 - protein, 67 aa, Homo sapiens
RSQWKKRSPRWSLTMAPACAKLVLLGTTLPEPCFLPSSGAPDTRASWWAWARRTPTWATRPRASVAS

SEQ ID NO: 75206 - protein, 74 aa, Homo sapiens
MRLGPRRRAACGRVAFGSSTFALVPVFAHLSILQSLVPAAGAASPVAISAQHLCYSHVTPGDPGAGAGQGPAPS

SEQ ID NO: 75207 - protein, 33 aa, Homo sapiens
TVWSCVISSCVALSSLTVRGRSWCWRTWRTPAC

SEQ ID NO: 75208 - protein, 36 aa, Homo sapiens
VSSGKTLAGLVGCAAPRTASHQPAPSLSCSTLICTP

SEQ ID NO: 75209 - protein, 34 aa, Homo sapiens
LRWRCCSSACWVFWSPPRMVVSIYPMPFLGMTLT

SEQ ID NO: 75210 - protein, 42 aa, Homo sapiens
MTSPSPGATSPKGAEMPFRSSTMPRDNPTLTRWGPSKSASSG

SEQ ID NO: 75211 - protein, 90 aa, Homo sapiens
MRGARCAWISCRSRSAWTAATASASGASPSSARSRTARRAASTPVRSAGAPSGPRAFAPTGSWRAWWRACGGWGWARGPGRGDARGTART

SEQ ID NO: 75212 - protein, 32 aa, Homo sapiens
MVFHLPLSDLFFMLLLAPKKSRMAKEPRTYWN

SEQ ID NO: 75213 - protein, 78 aa, Homo sapiens [sequence omitted]

SEQ ID NO: 75214 - protein, 35 aa, Homo sapiens
MPRSTAVSVGAAGATEPFAEKGCGRRRQPRQRQTV

SEQ ID NO: 75215 - protein, 81 aa, Homo sapiens [sequence omitted]

SEQ ID NO: 75216 - protein, 45 aa, Homo sapiens
MSPKESYVLILSFPSVWLCQVNSEREETVTNPERPNRAEMEACPD

SEQ ID NO: 75217 - protein, 33 aa, Homo sapiens
IGSASCLTSAQDFRASWCSTALVGALALASPHS

SEQ ID NO: 75218 - protein, 27 aa, Homo sapiens
LTSAQDFRASWCSTALVGALALASPHS

SEQ ID NO: 75219 - protein, 34 aa, Homo sapiens
KRRRKRKKRKMLGNIYLTCSTARTLASCCYSCKY

SEQ ID NO: 75220 - protein, 45 aa, Homo sapiens
MSNGTGLPLLAMSPTLWSCALSRLVISTSPRQQLLTWPRRMGPLW

SEQ ID NO: 75221 - protein, 44 aa, Homo sapiens
MSNGTGLPLLAMSPTLWSCALSRLVISTSPRQQLLTWPRRMGPL

SEQ ID NO: 75222 - protein, 107 aa, Homo sapiens
LCFGDALCVCVCVCMCVCVHACAAGKGRGECEGPGGRWRRARGALAPPQSNLRPRPARGRALTGAVRSCGGRHYSPAPTSPPPLPTVKEREASTTPRPKQKALWITK

SEQ ID NO: 75223 - protein, 32 aa, Homo sapiens
TLRPPRTWGLMGKVLAGAGEFCGACGTAAVAP

SEQ ID NO: 75224 - protein, 13 aa, Homo sapiens
MKQVTFMLLSGTI

SEQ ID NO: 75225 - protein, 40 aa, Homo sapiens
MRTYWLHSVWVLGFFLSLFSLQENILFPYLPEGGVHSIHI

SEQ ID NO: 75226 - protein, 94 aa, Homo sapiens
MSFGFGFLPKNCKWCLLALLRILPLLQISEKRLECSGAHASHCDTAGEPRATAVGMTALFLLKSDLSKPLSYVWRLLGSWSTQIATANLRNGHE

SEQ ID NO: 75227 - protein, 38 aa, Homo sapiens
MTLPAFRVSKYHGLCKRFQVSMEQIVLLTINMCIIISS

SEQ ID NO: 75228 - protein, 59 aa, Homo sapiens
MTVDRKTVYLLLLMITVLPEGPGLSYSPAHLQHLTQDPRGSRNWHRCTQQRFGHCHVRV

SEQ ID NO: 75229 - protein, 79 aa, Homo sapiens
MQVQVTILFLATSCEKTNIWVTLVSTLVLLLVIVASAAIDHTRVVIQKLGFRWHLCQGLPTTPGLPATSSLPIISRSSR

SEQ ID NO: 75230 - protein, 39 aa, Homo sapiens
LAVAAAAVARRPGTESESTVASAAAAAAAAVATAAGTRS

SEQ ID NO: 75231 - protein, 46 aa, Homo sapiens
MILSHLLHLCAHTCEGLGPASTTALPQTQLSTSRQDGITVTGGPEV

SEQ ID NO: 75232 - protein, 38 aa, Homo sapiens
MILSHLLHLCAHTCEGLGPASTTALPQTQLSTSRQALL

SEQ ID NO: 75233 - protein, 58 aa, Homo sapiens
MALAPRTSSISCRGPGPALAARVRSSRPTPTHPRPPQLPSLPQQARRHPSLPVIKYSS

SEQ ID NO: 75234 - protein, 76 aa, Homo sapiens
MQRMGRLRPWLCVPLRVGAGLGPNSTAAGFSLISEPRRWQSGRPGQVNPRAAGAQAPTPAQRGRKGPPPAQRAQRP

SEQ ID NO: 75235 - protein, 47 aa, Homo sapiens
MGTLCTVRSLGGACWCIPAGTGMSSKAGSSSLAPRKDGISSLPSAKM

SEQ ID NO: 75236 - protein, 31 aa, Homo sapiens
MPAWRRKWANGKGWKKTMLASVTPCFCQLSN

SEQ ID NO: 75237 - protein, 80 aa, Homo sapiens
MQKSPSSASLTLGAVDQSCSYSAILAPYSHYLLELWLRHYNRALSPLSKSWEMVIVNASPILEAPGCRGPQLAGCGGSGL

SEQ ID NO: 75238 - protein, 62 aa, Homo sapiens
MFLKLMATYSAAFLPVVIGLDRQAAVLNPLGSRSGVRKLLGAAWGLSFLLAFPQGSRTRNTI

SEQ ID NO: 75239 - protein, 199 aa, Homo sapiens
MVSAQTEPREDFFGDVSPRKVWAAFLTLDACGQPSSPWMPVGSLPHPGCLWAAFLTLDACGQPSSPWMPVGCLPHPGCLWAAFLTLDACGQPSSPWMPVTWFPWGLPKLRDPKPPSNLMTRLVSEHTCVVPEPLTNPLCNPAHAFPILKGPAHRPAHVFPLPLLCPYLVGSCPFWALVWHFTHKCVLWVVSGPPPAVRG

SEQ ID NO: 75240 - protein, 28 aa, Homo sapiens
MARPASYGSTLRRVPGCILCLPNSASWV

SEQ ID NO: 75241 - protein, 80 aa, Homo sapiens
MKSNLTLLTCLTLHGGEGWKGAAVCFETVEQFCSLRKWHVTYLTKDSGLCQQQEKLYTKFLVCIREHQMKKLRKPTENWP

SEQ ID NO: 75242 - protein, 47 aa, Homo sapiens
MTQPLPDSQGPCSWTLAAMLGGSPAATQRGHDSRGPSQASINCPTRQ

SEQ ID NO: 75243 - protein, 109 aa, Homo sapiens [sequence omitted]

SEQ ID NO: 75244 - protein, 48 aa, Homo sapiens
IPASSTTMCSEHVEEKKQLYLLVSFCLSSWTLTFSETQQSLQWSVGPP

SEQ ID NO: 75245 - protein, 60 aa, Homo sapiens
LYLLRCNILLLLLLLLLGSRCNFPSASLLLCLGTAKAWDRPRAASLCLPSSPRSIFPPLN

SEQ ID NO: 75246 - protein, 47 aa, Homo sapiens
ILQIGKLRPREAKRLCLSKTTRPPARKISVFLLWCPPVSYLTLPSRR

SEQ ID NO: 75247 - protein, 54 aa, Homo sapiens
VGEEGGGSSGMPPRGCLKLTIAGTPSSRMASHFATSQEAFTTPVCPASTGRTGC

SEQ ID NO: 75248 - protein, 43 aa, Homo sapiens
VNVLLPSCGCSTACSTTASQPSSGPCSGIDSISENSTQMLPSC

SEQ ID NO: 75249 - protein, 31 aa, Homo sapiens
LWRRSHRCSLMSSLWSQLVPVAARRQKAVSE

SEQ ID NO: 75250 - protein, 34 aa, Homo sapiens
RRTGSAQSRGSAMNLPGTAAAADLLAIFSQSAPC

SEQ ID NO: 75251 - protein, 35 aa, Homo sapiens
MRTLRCVTMTMMGCFPSLESVTWGKQGGPGKRMKN

SEQ ID NO: 75252 - protein, 41 aa, Homo sapiens
RAPPLHLEAGAITAAVWAQAMCSSGALGTAVARAWGQPVQS

SEQ ID NO: 75253 - protein, 72 aa, Homo sapiens
RKSIRAAAAAAAAAAAASAAEEDSAARAPPATSAAESHRHRPRASGQELPPPAPVPRPPAAPNPAPRARRHE

SEQ ID NO: 75254 - protein, 35 aa, Homo sapiens
RKRRRKRKKRKMLGNIYLTCSTARTLASCCYSCKY

SEQ ID NO: 75255 - protein, 29 aa, Homo sapiens
LAKPLLSFLLPPLSLQLRDGPGSSVSAVL

SEQ ID NO: 75256 - protein, 40 aa, Homo sapiens
MVAGWLLQLWTSHQNMAEAKAGRQRRRQNSFIHLWLSYEE

SEQ ID NO: 75257 - protein, 120 aa, Homo sapiens
VAAPRRTSASRWWIWRPWAGCWVRCCCWLSLASPSLSTSTMAPGSSAAVAKLRSPSPKALTTRRSSLTTRPTGRPSPAPRTTPSPRRHRCPQSPHPPALPPQAVPLSPPQRPELAEAPRR

SEQ ID NO: 75258 - protein, 44 aa, Homo sapiens
LAAAAATPAAAAAPAAARTPSARAHPGFPERDAAAAAPVRPRAP

SEQ ID NO: 75259 - protein, 53 aa, Homo sapiens
LSCLLAVPAVPAVPALSPLLPRLLDAGDASELVIGALRRAQAPSSARGAQAAP

SEQ ID NO: 75260 - protein, 46 aa, Homo sapiens
LRAPPASRAPRGRSMLPTAAGFSIWGQVGAAGSRAQVVRPMRRAGG

SEQ ID NO: 75261 - protein, 57 aa, Homo sapiens
VTAMSSWARRRSSSSRRVSARGMHTRLIPSLPGSPVCWAWPWYPDTTSFPLRCRGRV

SEQ ID NO: 75262 - protein, 33 aa, Homo sapiens
KSFCVLYGDVAVLFFRSLAPSASIRCTSCCPVP

SEQ ID NO: 75263 - protein, 31 aa, Homo sapiens
TPPSPARHGPLPTCPAFVCLCVFAGWPDLWL

SEQ ID NO: 75264 - protein, 33 aa, Homo sapiens
MPRLGAVGLLPPRAGRSAARPPAGPPAAAGIPG

SEQ ID NO: 75265 - protein, 47 aa, Homo sapiens
MTSPCFTSLSPTGLALARGRSRIRSRRRHIRNKFQFQSTTQHLARLG

SEQ ID NO: 75266 - protein, 158 aa, Homo sapiens
MLPRLVLNSWLQAVLPPWPPKVLGLQTWQGGLIDMDKKSTHRNPEDARAGKYEGKHKRKKRRKQNQNQHRSRHRSVTSFSSDDPMFPSSSSSSSGSQTDSSIEDAAKGKIKKKRREKTNKWEKRKSLVLLLRLECNDATSAHCNLCLPDSSNSPATAS

SEQ ID NO: 75267 - protein, 94 aa, Homo sapiens
MSLRRGETSSSLQLVARLLSLSQEDALLQVWNLLLRALAWQLTLDLRVLRSLGTHLGAVAFRDRPSYRCNNLLDILLWKRKRTTRGSMALGCRN

SEQ ID NO: 75268 - protein, 58 aa, Homo sapiens [sequence omitted]

SEQ ID NO: 75269 - protein, 95 aa, Homo sapiens
MCAFVSAAIPSSVIALLHFCWSQGRGVPANVRVVRPQPLPFYTVLGCLLACGGGRGSQYLCTVYCPEPAFIPNFSKIALKGGGRGSNIVLKGGTG

SEQ ID NO: 75270 - protein, 57 aa, Homo sapiens
MERWSHPKRQIGLSAHLITAAGRSKSCPPPRYCRGIPTAARISCTLKGRRLLRSLTP

SEQ ID NO: 75271 - protein, 56 aa, Homo sapiens
LYFGWKRHRRGCVLSLKISISCGLDQKLLITYLEGIYKCLSMCSLFVHVVYYITKE

SEQ ID NO: 75272 - protein, 44 aa, Homo sapiens
MYGESKRAAIAVMLGVLTKQVGCGHSRGAKISRNSQQVTWRRII

SEQ ID NO: 75273 - protein, 88 aa, Homo sapiens
VARFSTARGSARSPGLEGCFFPTAAFLPHAWPPLGGVWMAGRVGFLFIPTAHSLGPDIFSSSSCRASRAGEEHILSMELVVKVDRGRW

SEQ ID NO: 75274 - protein, 30 aa, Homo sapiens
MGGPGLRLDWTQAGVCVCVCMCVCGQWQHQ

SEQ ID NO: 75275 - protein, 62 aa, Homo sapiens
MHLGKEDLPAFLTSPLGFLLCSPGLWLSLLVLCWVTCHCSACMPCRSWLEPAGGDLPETLVK

SEQ ID NO: 75276 - protein, 95 aa, Homo sapiens [sequence omitted]

SEQ ID NO: 75277 - protein, 50 aa, Homo sapiens
LHKAGLQVLCFLIPSPDTHLLCGPGHVIKKLAVCMRLPTISIPRGLGGCL

SEQ ID NO: 75278 - protein, 150 aa, Homo sapiens
VSFRVCLVRLLSLVVSGISRRFPGLRELAAGLGLLGGALFGDSLFLPPRLECNGAILDHCNRCLQGSNDSPASASQVAGITGVCHHAQLIFVFLVETVSPRLPSWSRTPDLREPLKQNLTCKTQEPRSFKNSEVEGHRLLVLGSDIRRRA

SEQ ID NO: 75279 - protein, 42 aa, Homo sapiens
MVLILDSLSVVPSVLSWLFPESSGSLHIKQMLHRWICLDLPI

SEQ ID NO: 75280 - protein, 174 aa, Homo sapiens
MLLGSPRSWLMSTRPGLLSCSLSVTAAMKTWQNSCWSIPVKLGVEATVWSWRWRPQTSISSPSLGSRIFFLSNGMERFPETPRTGRLSCVCLLYPWWAVALYHLGRNLSTSTRSCFGTMWRSSPPPSWSSPGMWSSTSPSSCCLPTCCSWISIRCHTPPSWSCTRWSLSSSVMK

SEQ ID NO: 75281 - protein, 79 aa, Homo sapiens [sequence omitted]

SEQ ID NO: 75282 - protein, 48 aa, Homo sapiens
LKGFVSCLLPIISSALKNLSCPQFIMSRRFIFSLCFFLFQFILNAYFS

SEQ ID NO: 75283 - protein, 56 aa, Homo sapiens
MGIYLDKGISLFPLSLCLMGPHSAKLEGTKTLSWPSGSRGRGVGAGSESLHGLDPL

SEQ ID NO: 75284 - protein, 73 aa, Homo sapiens [sequence omitted]

SEQ ID NO: 75285 - protein, 42 aa, Homo sapiens
LSLDAKEFSVAQLDGWISLSSCDLTFCVSVSLISAGVPGGAG

SEQ ID NO: 75286 - protein, 67 aa, Homo sapiens
LQLEEAPQAGDLGRASPKPPASGRHPLKYFLQGFPFVRVSSSLTGLSGGAAGSALRNSGKWTPFSCP

SEQ ID NO: 75287 - protein, 103 aa, Homo sapiens
MSLRVCLKKLHEGLLLTPLHSLSWSLISMSSRRVKKGTKSRSFKPHPHLRMDGFLCRPCRPLSQQTFPAALEPSKTSTTSHQWLVRQCPQGSCCMPLIRPSWL

SEQ ID NO: 75288 - protein, 82 aa, Homo sapiens
VDSASISASMATFRRQRRSCVFLCTQLTACLYGASLSGRKCLKKQRSRWCVHSADQLVWPGPGGLVARKFQVEGKCRGYLQI

SEQ ID NO: 75289 - protein, 95 aa, Homo sapiens
LRPARAALVAPLPTPRRGLAAAAAHLPPQPPPATRTFSGPAPSGSPGTARHPRAADPARAGAPGRARHSAVASAARAAPEPRTGAQSAGDSGADP

SEQ ID NO: 75290 - protein, 42 aa, Homo sapiens
LRLCPRCVRPLSVTLCVSRCLAVAVTPRLSPSTSWTLPRKLH

SEQ ID NO: 75291 - protein, 132 aa, Homo sapiens
LGSSSLGEIFEFLPHPLGLLHTRPRLPASLPTHLSSFLCPPAASPALLPIPRPHSRLLPSEVVEERFPPGLVHVSRPLLAGLLGCFGPFVGTIVSHGRAGHHWGRWPTLRLLCPLGPGNIVTSRADLTNCRL

SEQ ID NO: 75292 - protein, 92 aa, Homo sapiens
MPPTPGPSILSSLVPIPVSPFHPCPPVLYLWPAPISESFFQSLIWLIPHLQLPPYMSHTIPWLALHSLLFPYSSFPVIPYQMVGTLSPALTR

SEQ ID NO: 75293 - protein, 256 aa, Homo sapiens
LSSRQSSSPCPRSARFVSPRLAVSLSLPSRSSAAPPSLPISGPLLRALFSPQSRPFWATPLFGTPPQSAPRSFGVPLENTFHSPQGLPVSFLHILWGFCTPSRWGLASSEPPLPLGFPSSGCSPYPLGAPRSQVGVFLLGTPQYVLSSLTSGAPLCFPLVCPLSLSLLVLSQVSEHPHFSGSGSPALLSLPLCAPTSVSVVSPLCASCAEGPPLSLLLCLGPLAPPCFFSPSPLSPLLSAPCLPLPFSVFAGSLGL

SEQ ID NO: 75294 - protein, 68 aa, Homo sapiens
LFPCSCSPLSLVLVLQKAVWMVPAREGVGVLGRQEAEDPDCFSLGNLTIGQIAPLQTERNLNSTKKAS

SEQ ID NO: 75295 - protein, 48 aa, Homo sapiens [sequence omitted]

SEQ ID NO: 75296 - protein, 76 aa, Homo sapiens
LRTRKMKLGGHSWICLLHFQLCSTSQRFLKNEDISALSSGGEVCLASASTLLLFTRCMHALSESGLCFPSRRDHPP

SEQ ID NO: 75297 - protein, 31 aa, Homo sapiens
MARAATGAGKATWTLFCWLMAPRACVHKTSS

SEQ ID NO: 75298 - protein, 132 aa, Homo sapiens
MKMTRGPSVSGCLPWTPGFKLSSLDVLGTSGSICFSFRGIAANDVFSLFLIPDCTWDFHSLYSFFLGSPVDSNFLDLSSFSEHPISWNSSLFCFVLLQALFSLAGRGKAVSTAGPRPWFPRQLLCSQLRGAC

SEQ ID NO: 75299 - protein, 25 aa, Homo sapiens
MQLQVQWLLLVLQTPLHKPTALSWL

SEQ ID NO: 75300 - protein, 128 aa, Homo sapiens [sequence omitted]

SEQ ID NO: 75301 - protein, 26 aa, Homo sapiens
MSSARELLLSILLARSFLQEPRNPCE

SEQ ID NO: 75302 - protein, 125 aa, Homo sapiens
VARPGPWSRASGMSPSPRWGFLCVLFTAVHPAPSTAPVQDKCPVNTWEAMQASSQQLLQTDPRPKPFLLPPLPPLLLISAGTEVSSLVFQKSPLHTQPEGAIKTVGQPTSVHSKVLSKGSLLLGE

SEQ ID NO: 75303 - protein, 102 aa, Homo sapiens
MKHVYYRKHQLAQMLLIFGVELQAGDLEGPRSACSHPLTSRKRRNVGLEPMKSTGIWLCSVTLDKSLPLSGLQFPPCSMRAGDFVCFIHNVFPELSTVSGTH

SEQ ID NO: 75304 - protein, 119 aa, Homo sapiens
LALCQALCWMLGSIVRPGTAKAETNIPTVAHDTKLHRPENGRIHRNERQAVRCPALGRLQKRREDHPSWLTLGGLGSSQIVFLGIYKRVKIDTRNIHLFPFIYLTHTLGAMSSIPRRGS

SEQ ID NO: 75305 - protein, 61 aa, Homo sapiens
LAPALQPWRPDPMGCHQRPRDRHQFKPQDTLDSSNHPEGCADGRNQGPSLAAEEGSYGWAW

SEQ ID NO: 75306 - protein, 61 aa, Homo sapiens
LQPPQSQPTLLCLWRAVLLGGSCPAHCRMLKGIPGLHPPLASSSQSDNSQKCLQTLPSLPR

SEQ ID NO: 75307 - protein, 48 aa, Homo sapiens
MTSELLFNSLLNFLSQKAEAQSLETDDSCPCHENTPFPVCWRNIREVQ

SEQ ID NO: 75308 - protein, 28 aa, Homo sapiens
MTSELLFNSLLNFLSQKAEAQSLETDEH

SEQ ID NO: 75309 - protein, 56 aa, Homo sapiens
MTSELLFNSLLNFLSQKAEAQSLETDAPEFQKLVCMDRFRAVPQSPGPVNKKRHVT

SEQ ID NO: 75310 - protein, 84 aa, Homo sapiens
ISLLWTVSLHLMLQKSSLSLLVELTPRSLGFHAWQMARKNCTTFRFQVPKGEAQGQNGNSSMRTQQSTKVGQLHVEESEQIEFA

SEQ ID NO: 75311 - protein, 14 aa, Homo sapiens
MSFIVRLLVSEFVL

SEQ ID NO: 75312 - protein, 87 aa, Homo sapiens
LMTVSLFLLLATSQSQDGCCDSGSCPNSRQQEGHGAAPASRCPCRPSLQAQEPKEESTQMWWLTPVIPPLWEAEARGSLEPRSWRPT

SEQ ID NO: 75313 - protein, 18 aa, Homo sapiens
TKKRSYFSFYFAACLLPV

SEQ ID NO: 75314 - protein, 10 aa, Homo sapiens
ILWGLVGMPF

SEQ ID NO: 75315 - protein, 40 aa, Homo sapiens
MSFLRVIFKFKRCSCRCCSIFAVTLRAWRDSSQEVSCSLC

SEQ ID NO: 75316 - protein, 41 aa, Homo sapiens
LTVLLCPLVWWQCGLSATPSGTRARSCSLFSQPGASHQAGV

SEQ ID NO: 75317 - protein, 85 aa, Homo sapiens
VSPGAALLTVLPVPAVARRSAGPAATLATDAGRAATPGSWPPRRLRPPWPSGPQAPPRHPPRTASSARGSPAPCSPSSSWPGSCA

SEQ ID NO: 75318 - protein, 35 aa, Homo sapiens
MCSLGVLLSPPQSPASLPSCPLPKGKNSLEVGRAP

SEQ ID NO: 75319 - protein, 63 aa, Homo sapiens
KKRSPRWSLTMAPACAKLVLLGTTLPEPCFLPSSGAPDTRASWWAWARRTPTWATRPRASVAS

SEQ ID NO: 75320 - protein, 12 aa, Homo sapiens
LLFFFVFPLSSF

SEQ ID NO: 75321 - protein, 76 aa, Homo sapiens
LELRPCVFSRLLIRRGALGAPAWVAVPSVCGPQFLGGAWTLALRGRPVPRSVATDPRTLFAGDSRSLRLPRMMACD

SEQ ID NO: 75322 - protein, 63 aa, Homo sapiens
LSLVKSNIKICLLLILMLPAQQVHQRARMNYGCHECPCEAVGKPWLDCEGYLKSILESTRSSM

SEQ ID NO: 75323 - protein, 48 aa, Homo sapiens
TPRLRVMESRTLLLLFSGAVALIQTWADYNYNQGRNDLIFTLQLWKRQ

SEQ ID NO: 75324 - protein, 26 aa, Homo sapiens
KIPSLHILWVSASVLISLHTPSAFLS

SEQ ID NO: 75325 - protein, 45 aa, Homo sapiens
TGAWWARPRCKAWIAALWLSPQALRAAWSRCCSPSLAHWSPRSAC

SEQ ID NO: 75326 - protein, 51 aa, Homo sapiens
KQSGAGASSAARSMVGAHSPRRPVLRSTSFTSSSASSFSGAAGGAVWRPAS

SEQ ID NO: 75327 - protein, 33 aa, Homo sapiens
MRTTTPTVLASWPSLTQSTNSTQPTALTSPLTR

SEQ ID NO: 75328 - protein, 47 aa, Homo sapiens
MPRSRRGTGNVSGSCTTWSCSVAWPWPAVPSSYTQQPSCSTSGGSFF

SEQ ID NO: 75329 - protein, 83 aa, Homo sapiens
MPSSLLSLGRSSQQLLQTDPRPKPFLLPPLPPLLLISAGTEVSSLVFQKSPLHTQPEGAIKTVGQPTSVHSKVLSKGSLLLGE

SEQ ID NO: 75330 - protein, 61 aa, Homo sapiens
MGVCPFAFLFCSWNPAGGFDRILGQDLVALPDDPLHSDCPLYPVLLGAPRDTFLASLRGTI

SEQ ID NO: 75331 - protein, 57 aa, Homo sapiens
LPPRACSPPSPRLHPPRSRKRQLRLRGWRRLPPPTTSALAALALRPSPAAAPPPRRR

SEQ ID NO: 75332 - protein, 30 aa, Homo sapiens
LGFANLVALSVSCFSKAAVQKERRYQEGTC

SEQ ID NO: 75333 - protein, 48 aa, Homo sapiens
IICFFALVAPVAWVGPPAPPWQDNLLVSPSLACSSCRACELLTTGSTL

SEQ ID NO: 75334 - protein, 34 aa, Homo sapiens
ILLMLLTTWLLHSHQTRDAILDFPTLICSSPLTL

SEQ ID NO: 75335 - protein, 9 aa, Homo sapiens
MNGWLLLGI

SEQ ID NO: 75336 - protein, 141 aa, Homo sapiens
KREREREREGEARPGEAGPSGSGLRGRGAGLGAGAGSGAASLSAPALLEPHEPLSPWRARGRGTGARRLLLVKYPSRPETRAASRPREVYSPAPFLKGRNRSFSQRTAFLSAFLALSEIGGPQGWQARLAGLLIFFLISNF

SEQ ID NO: 75337 - protein, 9 aa, Homo sapiens
RAFFFFWVM

SEQ ID NO: 75338 - protein, 33 aa, Homo sapiens
LCFSSLCVLWSLILLYRNSFKNYVITPRIFCNV

SEQ ID NO: 75339 - protein, 120 aa, Homo sapiens
KEAGRRRLHSLARSLASRRRCGSALRFLLAIRSVARARNSSTSAGSELGSGVLRAGGHRARSEPAPHLWSRRPSGEPAGVPPRECSGRRAARAPAEARPPAGRRAHHGAPSARVQRLLPR

SEQ ID NO: 75340 - protein, 35 aa, Homo sapiens
VAKGRRRGLSFRGSLPFLCCRSVTLALSPCLDHFL

SEQ ID NO: 75341 - protein, 45 aa, Homo sapiens
LRVMESRTLLLLFSGAVALIQTWADYNYNQGRNDLIFTLQLWKRQ

SEQ ID NO: 75342 - protein, 56 aa, Homo sapiens
LGTGIGGLFSKLLVLIAPAFQITSGNLWEEPRGWKMFLSFAKGRKLCHPAGDLSHE

SEQ ID NO: 75343 - protein, 88 aa, Homo sapiens
LSQGARKLCHCATWVFFILQSLPQQNRTPQTPSSSLCVALSGSNKSKLWVCECLCVLLFTSHLLKSVYVRGWGVCVKESEEEKEREIN

SEQ ID NO: 75344 - protein, 13 aa, Homo sapiens
LNMTLLLTLTLGG

SEQ ID NO: 75345 - protein, 84 aa, Homo sapiens
IDWVSGAFFFSPLSFFSSVLLHARKLQSAARPPWVRDIQPRSLPCIVQPKDERPKGRKLKKSPTCAGSVHGLGKGIQRRWERRV

SEQ ID NO: 75346 - protein, 88 aa, Homo sapiens
KRAFGARASRGGARSLPVPLPLVISAALGGPGRSETESESPGAKPGETQLRRTPAPLSLLLRPSRGASPSAPRAGELGAQVPAAPGMV

SEQ ID NO: 75347 - protein, 51 aa, Homo sapiens
VYLRVRPILPAGLCLGVTLPELAPTTVATVMLMCDCCQEPAHMTVWRKFFP

SEQ ID NO: 75348 - protein, 46 aa, Homo sapiens
VARLRHLRDLRAPAGPVGVLCAAGTACGWPGPGPLLVERVRAFLRR

SEQ ID NO: 75349 - protein, 26 aa, Homo sapiens
MCVCVCVCVCVCARAHVHMCVGRWRG

SEQ ID NO: 75350 - protein, 91 aa, Homo sapiens
MVVFPSLSSPTMMTVCSGSVGGRAASGPNPKTKGLCAPTRPPRKEIALPAGWGPLPTVPRLLPTQLRHLPHSGTVEKTAEPPPPFTFQKSV

SEQ ID NO: 75351 - protein, 25 aa, Homo sapiens
MRGRTFAVLFTTLPPAQNLAYAYSM

SEQ ID NO: 75352 - protein, 64 aa, Homo sapiens
LDFTHVLFLIRLLKQKLKKKKQSKRDMTLWSLLILLRRGGKVLAMDLLTVKIPLIIISSRQEIE

SEQ ID NO: 75353 - protein, 33 aa, Homo sapiens
MTAAVSLTRSPAISASCAASRSASPWAWPWTWF

SEQ ID NO: 75354 - protein, 57 aa, Homo sapiens
LAKGAVAAAAAAAAAATARKSLPGGEQDRTKPECRRQRIRSQSSCGQVGKRPGRLGI

SEQ ID NO: 75355 - protein, 125 aa, Homo sapiens [sequence omitted]

SEQ ID NO: 75356 - protein, 31 aa, Homo sapiens
MPVLAARAAAVAGAGEAAAGPGRGVAWGTGA

SEQ ID NO: 75357 - protein, 91 aa, Homo sapiens [sequence omitted]

SEQ ID NO: 75358 - protein, 60 aa, Homo sapiens
VPLPKPLGPIHGKRDLPLHLLHAALSPPAAGVAGMGGPAAGGCPAVPEPQVPVKSPGPTH

SEQ ID NO: 75359 - protein, 66 aa, Homo sapiens
LMCTALCWALVLGDRCSVVECVPRNREGAMGARSQGIRNIPPRTHSHLFSNSAYLLNSPDALPVDC

SEQ ID NO: 75360 - protein, 69 aa, Homo sapiens
LSRLVSRLVGSVPRDGTGRAHFRVLLSPLRPKKGPSLSPRLGVLSLHSFLPPAAAAAANLQGTAAAFSR

SEQ ID NO: 75361 - protein, 138 aa, Homo sapiens
LKRAPRLERGGRGWRPGCGFGLQTAVLVCAGRGGGFTLCPRPPALPAGLRSPAVLGPRRCGARPGKGPKEKKKQPLPAAAFPSPSASPPRPESQGGSGRRGEESGGPGPEPPSRAPARRWPSAPRPGGCLQTAPILWG

SEQ ID NO: 75362 - protein, 112 aa, Homo sapiens
VRGRSRCAVAGSAVSSPSPASAEIPGPIETRTSLSATASHASAAGNPAISAPAEKVPGCRRRRREREERLGGSPGRGVVRLRERPGCGHTGLVNSHLLGSCSRTHSLPHPLF

SEQ ID NO: 75363 - protein, 92 aa, Homo sapiens
MTKVPISAKFSQQHETAYSRRNSFCLPSLSLSRSLALALALSRCVLISPPNPLSPLQPPSSLAFSLASLFSSSTHPLWFDNFVLSVSQKRLL

SEQ ID NO: 75364 - protein, 104 aa, Homo sapiens
MAATSACSTFNWKSPHMSWFSLLKICLSSLGGLMHFSVSADQLLPPPNLNGRMRHSGFSYPKRGFFPLFVSIIHFIGRNSVPVNSNWDQRNRVPLLKMAVTRGY

SEQ ID NO: 75365 - protein, 45 aa, Homo sapiens
LQIKLPDFTHSSFCLWTGTGLGLSQHLPTGGCSLPMGHLGGPWAS

SEQ ID NO: 75366 - protein, 62 aa, Homo sapiens
VRQNEQEDGVWRVLAGSLPVGVRNRFLFPSPSPPSEQHSSGKRGFLLSRLLVTNILCWLPVG

SEQ ID NO: 75367 - protein, 120 aa, Homo sapiens
LSFSLQPLALLIRMKTLLFGVWTLLALILCPGVPEELFEVSIWPSQALVEFGQSLVVNCSTTCPDPGPSGIETFLKKTQVGKGPQWKEFLLEDVTENSILQCFFSCAGIQKDTSLGITVY

SEQ ID NO: 75368 - protein, 119 aa, Homo sapiens
VSLASLLPARAPRPWPPRPLLRRGRDSARRHFWTRLLLSVLFLRAPLQTAAPGTDPPPGLGALLACPGVPASRCARQGSGGVQLHLGRGTGPEGLGGHESLASAAFVFQRGGSDEPLLT

SEQ ID NO: 75369 - protein, 27 aa, Homo sapiens
MLCTTLQTVCSLILMDIVWARGRDGWL

SEQ ID NO: 75370 - protein, 53 aa, Homo sapiens
VHAASINLLSSRPSIRTCPLASRILGTPLALPCVEMFMSVPVGHFVKLKSFKR

SEQ ID NO: 75371 - protein, 37 aa, Homo sapiens
MLPIGWSQALGLSFPASAFKYAGVTGMSHCTGPDWYI

SEQ ID NO: 75372 - protein, 27 aa, Homo sapiens
VAPTLLGLGSQGLISSSVERAGSTPLL

SEQ ID NO: 75373 - protein, 83 aa, Homo sapiens
LFLFLFLFLWGGATKQTQSILCQVLGWTGQLCVGVVFFSIFLFVSCFLIMFTICLNHSVFYKDSTSSPLSSPLLRPLRLLGDA

SEQ ID NO: 75374 - protein, 167 aa, Homo sapiens
LLSTVLPSLLQSQTNSSPSPWGDSASRSCWRNEDVCPCLPGQARFLPSSRVSPDPDSVPFCLPATSIPKFESADTLLPATLPSYCVVCFSWCFKSVCRASAVTGNCTRCSDLVVLCLPINKSRLFLFLFAAICVCVCVCVARYLALLTMHCCFFPEGPAGTVAMVCV

SEQ ID NO: 75375 - protein, 27 aa, Homo sapiens
MRRMETLARQCLWAASFAGPPPKPRTS

SEQ ID NO: 75376 - protein, 98 aa, Homo sapiens [sequence omitted]

SEQ ID NO: 75377 - protein, 423 aa, Homo sapiens; identical to SEQ ID NO: 1613

SEQ ID NO: 75378 - protein, 248 aa, Homo sapiens; identical to SEQ ID NO: 15430

SEQ ID NO: 75379 - protein, 58 aa, Homo sapiens
MKHLVASSILGVFVLTPSLAMMNIRFNHPLYGSFGTQIIHIGAFQGMVSIRDNNIFSE

SEQ ID NO: 75380 - protein, 356 aa, Homo sapiens
MLPPWTLGLLLLATVRGKEVCYGQLGCFSDEKPWAGTLQRPVKLLPWSPEDIDTRFLLYTNENPNNFQLITGTEPDTIEASNFQLDRKTRFIIHGFLDKAEDSWPSDMCKKMFEVEKVNCICVDWRHGSRAMYTQAVQNIRVVGAETAFLIQALSTQLGYSLEDVHVIGHSLGAHTAAEAGRRLGGRVGRITGLDPAGPCFQDEPEEVRLDPSDAVFVDVIHTDSSPIVPSLGFGMSQKVGHLDFFPNGGKEMPGCKKNVLSTITDIDGIWEGIGGFVSCNHLRSFEYYSSSVLNPDGFLGYPCASYDEFQESKCFPCPAEGCPKMGHYADQFKGKTSAVEQTFFLNTGESGNFTS

SEQ ID NO: 75381 - protein, 51 aa, Homo sapiens
MRPSVWAAVAAGLWVLCTVIAEGPPALPALALPLAGAPDAGGCQGAEGPLP

SEQ ID NO: 75382 - protein, 75 aa, Homo sapiens
MRPSVWAAVAAGLWVLCTVIAEGPPALPALALPLAGAPDAGGCQGAEGPLRGRGAELGAAQLLLPPQEGSSAAIA

SEQ ID NO: 75383 - protein, 123 aa, Homo sapiens
MRPSVWAAVAAGLWVLCTVIAEGPPALPALALPLAGAPDAGGCQGAEGPLRGRGAELGAAQLLLPPQEGSSAAIVLRSAPPRGPGHRGRPGSAQRPAPLGAAPRRRPDPGAAGGRGEGCGGLP

SEQ ID NO: 75384 - protein, 2130 aa, Homo sapiens
MSAVGLVLLVLALRLRATTVKPEEGSFCSNSQVAFRDACYEFVPLGRTFRDAQSWCEGQGGHLVFIQDEGTQWFLQKHISQDREWWIGLTWNLARNGTTEGPGTWLDTSNVTYSNWHGGQAAAAPDTCGHIGRGPSSEWVTSDCAQTFAFMCEFRVGQSLACEGLNATVHCGLGQVIQVQDAVYGRQNPHFCTQDAGRPSDLEQGCSWANVKEEVAGQCQELQSCQVAADETYFGNLCPTQGSYLWVQYQCREALQLMVSSESFIFDNVTISLTWLLSPYIGNLSCIISTGDSHTFDPYNPPSVSSNVTHQFTSPGEFTVFAECTTSEWHVTAQRQVTVRDKMETLSVTACSGLSQSGAGPLCQAVFGDPLWIQVELDGGTGVTYTVLLGDITLAESTTQKGSLPYNLILDRETQKLMGPGRHRLEIQATGNTTTSTISRNITVHLVELLSGLQASWASDHLELGQDLLITISLAQGTPEELTFEVAGLNATFSHEQVSFGEPFGICRLAVPVEGTFLVTMLVRNAFSNLSLEIGNITITAPSGLQEPSGMNAEGKSKDKGDMEVYIQPGPYVDPFTTVTLGWPDNDKELRFQWSCGSCWALWSSCVERQLLRTDQRELVVPASCLPPPDSAVTLRLAVLRGQELENRAEQCLYVSAPWELRPRVSCERNCRPVNASKDILLRVTMGEDSPVAMFSWYLDNTPTEQAEPLLDACRLRGFWPRSLTLLQSNTSTLLLNSSFLQSRGEVIRIRATALTRHAYGEDTYVISTVPPREVPACTIAPEEGTVLTSFAIFCNASTALGPLEFCFCLESGSCLHCGPEPALPSVYLPLGEENNDFVLTVVISATNRAGDTQQTQAMAKVALGDTCVEDVAFQAAVSEKIPTALQGEGGPEQLLQLAKAVSSMLNQEHESQGSGQSLSIDVRQKVREHVLGSLSAVTTGLEDVQRVQELAEVLREVTCRSKELTPSAQWEASLALQHASEALLTVSAKARPEDQRRQAATRDLFQAVGSVLEASLSNRPEEPAEASSSQIATVLRLLRVMEHVQTTLLLGKLPGGLPAMLATPSISVYTNRIQPWSWQGSSLRPDAADSATFMLPAASSLSSLEGGQEPVDIKIMSFPKSPFPARSHFDVSGTVGGLRVTSPSGQLIPVKNLSENIEILLPRHSQRHSQPTVLNLTSPEALWVNVTSGEATLGIQLHWRPDIALTLSLGYGYHPNKSSYDAQTHLVPMVAPDELPTWILSPQDLRFGEGVYYLTVVPESDLEPAPGRDLTVGITTFLSHCVFWDEVQETWDDSGCQVGPRTSPYQTHCLCNHLTFFGSTFLVMSNAINIHQTAELFATFEDNPVVVTTVGCLCVVYVLVVIWARRKDAQDQAKVKVTVLEDNDPFAQYHYLVTVYTGHRRGAATSSKVTVTLYGLDGEREPHHLADPDTPVFERGAVDAFLLSTLFPLGELRSLRLWHDNSGDRPSWYVSRVLVYDLVMDRKWYFLCNSWLSINVGDCVLDKVFPVATEQDRKQFSHLFFMKTSAGFQDGHIWYSIFSRCARSSFTRVQRVSCCFSLLLCTMLTSIMFWGVPKDPAEQKMDLGKIEFTWQEVMIGLESSILMFPINLLIVQIFQNTRPRVAKEQNTGKWDRGSPNLTPSPQPMEDGLLTPEAVTKDVSRIVSSLFKALKVPSPALGWDSVNLMDINSLLALVEDVIYPQNTSGQVFWEEAKKREDPVTLTLGSSEMKEKSQCPKPKAARSGPWKDSAYRQCLYLQLEHVEQELRLVGPRGFSQPHSHAQALRQLQTLKGGLGVQPGTWAPAHASALQVSKPPQGLPWWCILVGWLLVAATSGVAAFFTMLYGLHYGRASSLRWLISMAVSFVESMFVTQPLKVLGFAAFFALVLKRVDDEEDTVAPLPGHLLGPDPYALFRARRNSSRDVYQPPLTAAIEKMKTTHLKEQKAFALIREILAYLGFLWMLLLVAYGQRDPSAYHLNRHLQHSFTRGFSGVLGFREFFKWANTTLVSNLYGHPPGFITDGNSKLVGSAQIRQVRVQESSCPLAQQPQAYLNGCRAPYSLDAEDMADYGEGWNATTLSNGSTRARTNVKGIPSGANSLCTGEEATWSPWGLIAKARQEFSAISLTTPGWTP

SEQ ID NO: 75385 - protein, 72 aa, Homo sapiens; identical to SEQ ID NO: 41165

SEQ ID NO: 75386 - protein, 239 aa, Homo sapiens; identical to SEQ ID NO: 20269

SEQ ID NO: 75387 - protein, 222 aa, Homo sapiens; identical to SEQ ID NO: 20270

SEQ ID NO: 75388 - protein, 24 aa, Homo sapiens
LEISANTKIFKSVHSRCSTNLLNE

SEQ ID NO: 75389 - protein, 62 aa, Homo sapiens [sequence omitted]

SEQ ID NO: 75390 - protein, 18 aa, Homo sapiens
LLLLVTGNKRIQNLRDTA

SEQ ID NO: 75391 - protein, 122 aa, Homo sapiens
VTSKGVLQKMEEVKREMKIKNLLEIKHVFEKFKSRFLFFSSQATLGLIKCLVRGILEPRKGEKRFRNLHWPGRSLRHQRQTASIQRLSEGTAAASLSYPTQGLLSLAQGKCSVMSKECLVEV

SEQ ID NO: 75392 - protein, 196 aa, Homo sapiens
LIQGGQKTQKRVLLPGPQQRGPFQHCKFHNKFHGDHQTGSLVLTCRMEKAGEHFRRWASLCGLTRRDGRGETKPQGSVYSNQKVPCGFEGSIRGALAATESIQPPAKHLVQLGHLRWAEKHIVIYIQGFGGHKDCAKSSSSMGFPRLWRGRSYMHVDTWESGVCCRATGWQRGAAFQEIDPKTHQCCIPRPVLCLC

SEQ ID NO: 75393 - protein, 261 aa, Homo sapiens
LEINSKFMGTYYQKHQTARDLLALGGNPFLSLLGKGWVQLMKTVWSSLPGKERTEIGLGPGIWELGLLSWVELSQASGADQWGLKLEILVRQLQGYPKEKTKLMEAARKQDTPQNKRWITKWKNEAEEIGGGLHSFTSKEDNYTLVVDMNCLDVQGCGDDVNNRLLHSASYPTASWVDEAMPTASGRSQHQAHLTQLRQSCTENTYAWSAQMVSYFSCCMIHNNLCSVVVCLFFLLGLQFLKELNLENKPGHVGLCHARTL

SEQ ID NO: 75394 - protein, 122 aa, Homo sapiens
MRQPLSRLSSEQSCCPRGALLNAKTPSLLGSRPQHLGLGPGPDSVNPRAPRRDRGVAEQARAGHGVGGISETCWERQNPNYGSNGGRQGTTPRNGPRGDQEGGWREPRKRSGPRAKNTPRPS

SEQ ID NO: 75395 - protein, 28 aa, Homo sapiens
ITATLSKPLCWFGFSFQCGSSCLLLSGI

SEQ ID NO: 75396 - protein, 23 aa, Homo sapiens
LLQLFSKAGFPGRSQAVTEWSHG

SEQ ID NO: 75397 - protein, 35 aa, Homo sapiens
MAIVDVKAMFKVAVSWGQGSVEGGFQSSQEKPGVS

SEQ ID NO: 75398 - protein, 64 aa, Homo sapiens
VRRPAERPLVTFSWGRRGRLKGLGGRGCGGGEVHFGPGRGSDRDPLLAAGACSEEEKAAVAVAS

SEQ ID NO: 75399 - protein, 40 aa, Homo sapiens; identical to SEQ ID NO: 28871

SEQ ID NO: 75400 - protein, 85 aa, Homo sapiens
RIGARLLQDGGLRAASGVVCAQAARGAGSAQGLNFPPEPQLEEASARGGEAARRGGHPRGERRGRRASKAVPEPRRPRGGDPRAF

SEQ ID NO: 75401 - protein, 52 aa, Homo sapiens
LPGPACPGVNFSSQRREEWKPYWMRTGEPVTESRYNADPVKSELYISTYAGQ

SEQ ID NO: 75402 - protein, 32 aa, Homo sapiens
MRTGEPVTESRYNADPVKSGVYPKKKNLYNVF

SEQ ID NO: 75403 - protein, 33 aa, Homo sapiens
MRTGEPVTESRYNADPVKSERRRPLLVASLLAP

SEQ ID NO: 75404 - protein, 41 aa, Homo sapiens
LIGVPESDRENGTKLENTLQDIIQENFPNLARQANIQIQEI

SEQ ID NO: 75405 - protein, 82 aa, Homo sapiens
LVKDTSIHSTQLLKAEIFSASLDAAPSPTPYIRTHPSSGLQRWLLDAARSPTPYIRMHPASRLQRWCSTCTLLPSPSYHTPA

SEQ ID NO: 75406 - protein, 309 aa, Homo sapiens
LSHPAGAAVAGGAARARAANLRLRIGWSGASRERRGLGGWAWAGGAGCSGGSGGLRVLGGSGRCPRGRRHDGPRVPRLRRHGHRAGRGARGRGVHRLRLSAGGQHHRVRGAVRGEQRRRLLGRGPVRVPGRCWQNPDSGWRLPRESGEGVESADPAEWEAPHPPPGEPAAAEPALPGHRLQLLQDGREQAPDPRPEDGPRDCCLPLPGLPYGGHAAHAPGPQRPAPGECVRAWKDVSSLGKRALHQCAGHRPVPVYSTLCAPAGIRGEEPRGVHDCPEAPTEDEAGLDAHRPAPLGPLRSSAPGCSQNA

SEQ ID NO: 75407 - protein, 240 aa, Homo sapiens
LSHPAGAAVAGGAARARAANLRLRIGWSGASRERRGLGGWAWAGGAGCSGGSGGLRVLGGSGRCPRGRRHDGPRVPRLRRHGHRAGRGARGRGVHRLRLSAGGQHHRVRGAVRGEQRRRLLGRGPVRVPGRCWQNPDSGWRLPRESGEGVESADPAEWEAPHPPPGEPAAAEPALPGHRLQLLQDGREQAPDPRPEDGPRDCCLPLPGLPYGGHAAHAPGPQRPAPGRQPPSCIFPHLGL

SEQ ID NO: 75408 - protein, 228 aa, Homo sapiens
LRVLGGSGRCPRGRRHDGPRVPRLRRHGHRAGRGARGRGVHRLRLSAGGQHHRVRGAVRGEQRRRLLGRGPVRVPGREAPHPPPGEPAAAEPALPGHRLQLLQDGREQAPDPRPEDGPRDCCLPLPGLPYGGHAAHAPGPQRPAPGECVRAWKDVSSLGKRALHQCAGHRPVPVYSTLCAPAGIRGEEPRGVHDCPEAPTEDEAGLDAHRPAPLGPLRSSAPGCSQNA

SEQ ID NO: 75409 - protein, 24 aa, Homo sapiens
LEISANTKIFKSVHSRCSTNLLNE

SEQ ID NO: 75410 - protein, 107 aa, Homo sapiens
TGGRRAGPGAGRLRAAALDPTRRERPRDAEQEEEVQRAVPAGADQEDHADGRRDWEGGGGGACHHLPGARALPRVAVEEGLPGDPVAEREDHDHIPPEAVHRAGAAV

SEQ ID NO: 75411 - protein, 38 aa, Homo sapiens
MVLSEKNFQRIHMFTRDTISLLLVPLERTIHTGGILGM

SEQ ID NO: 75412 - protein, 102 aa, Homo sapiens
LKTFRMVLSERIGIPVYPGQVILKTQHISCNQSTISLLNKDLGIIYIRSRVTQLLDISTPRPKVCNNQSENFQRIHMFTRDTISLLLVPLERTIHTGGILGM

SEQ ID NO: 75413 - protein, 59 aa, Homo sapiens
IIYIRSRVTQLLDISTPRPKVCNNQSENFQRIHMFTRDTISLLLVPLERTIHTGGILGM

SEQ ID NO: 75414 - protein, 59 aa, Homo sapiens
LAAASGPQGAALLLEGCRARRAPPAGPKGASAPPGPAARVPGSRRRRRLRCPGPARCLP

SEQ ID NO: 75415 - protein, 15 aa, Homo sapiens
LKISSVGNSSTLKTF

SEQ ID NO: 75416 - protein, 65 aa, Homo sapiens
LFFKAEDIQERGLGHWPRRPLRAVDTALFTLCSWHDTAETASNNEFGATKRNSEKANLFQLMGTL

SEQ ID NO: 75417 - protein, 31 aa, Homo sapiens
IFAASSQGPPPPEPPSPGAAALRRPPPPPPP

SEQ ID NO: 75418 - protein, 10 aa, Homo sapiens
LRRPPPPPPP

SEQ ID NO: 75419 - protein, 37 aa, Homo sapiens
RKKDSRKERVQFGDEGSRRLGLATTRRRRAGVVRRGS

SEQ ID NO: 75420 - protein, 43 aa, Homo sapiens
RFGGEARKKDSRKERVQFGDEGSRRLGLATTRRRRAGVVRRGS

SEQ ID NO: 75421 - protein, 37 aa, Homo sapiens
LWCECKGKAFEENENSTPVNTQMTRKHNSLIAEKKKV

SEQ ID NO: 75422 - protein, 96 aa, Homo sapiens
LSRGCHVSARFVPSSVQRPGRIHPRPHPSPIRRDLAYHEGQQQMQADGSAHGAPGPSGGHRDAGQGQENAGAGRVPRARPAEVQGAGGAFLAAACF

SEQ ID NO: 75423 - protein, 56 aa, Homo sapiens
LRATEELLNQKRAPNLHVAQRQNLWVTMRVTALSLDISRKAADDKSLRNLFVDASA

SEQ ID NO: 75424 - protein, 16 aa, Homo sapiens
VHGGILGLRRLWLSTM

SEQ ID NO: 75425 - protein, 28 aa, Homo sapiens
MTYLINLKRLLRKKVLNDTSGMTLRRTA

SEQ ID NO: 75426 - protein, 24 aa, Homo sapiens
LPPRVQGPPERQPGGGCRSGIPWG

SEQ ID NO: 75427 - protein, 77 aa, Homo sapiens
LPPRVQGPPERQPGGGCRSGIPWGREVHLSQEAPRVGRICPREQGTSSVPEPRASPAAASSSPPLWSRRATTTGFER

SEQ ID NO: 75428 - protein, 71 aa, Homo sapiens
LRRSPEDCLPLRASLPPRVQGPPERQPGGGCRSGIPWGREVHLSQEAPRVGRICPREQGHARLLAALCDHV

SEQ ID NO: 75429 - protein, 112 aa, Homo sapiens
KYSPTSPKYSPTSPKYSPTSPTYSPTTPKYSPTSPTYSPTSPVYTPTSPKYSPTSPTYSPTSPKYSPTSPTYSPTSPKGSTYSPTSPGYSPTSPTYSLTSPAISPDDSDEEN

SEQ ID NO: 75430 - protein, 183 aa, Homo sapiens; identical to SEQ ID NO: 56167

SEQ ID NO: 75431 - protein, 98 aa, Homo sapiens
KYSPTSPTYSPTTPKYSPTSPTYSPTSPVYTPTSPKYSPTSPTYSPTSPKYSPTSPTYSPTSPKGSTYSPTSPGYSPTSPTYSLTSPAISPDDSDEEN

SEQ ID NO: 75432 - protein, 161 aa, Homo sapiens
IHTTVSNLYPKLTQLQPQLAQLQPNLTHKYTPTSPSYSPSSPEYTPTSPKYSPTSPKYSPTSPKYSPTSPTYSPTTPKYSPTSPTYSPTSPVYTPTSPKYSPTSPTYSPTSPKYSPTSPTYSPTSPKGSTYSPTSPGYSPTSPTYSLTSPAISPDDSDEEN

SEQ ID NO: 75433 - protein, 178 aa, Homo sapiens
ITQLFPDLTKLLPFQPTIHTTVSNLYPKLTQLQPQLAQLQPNLTHKYTPTSPSYSPSSPEYTPTSPKYSPTSPKYSPTSPKYSPTSPTYSPTTPKYSPTSPTYSPTSPVYTPTSPKYSPTSPTYSPTSPKYSPTSPTYSPTSPKGSTYSPTSPGYSPTSPTYSLTSPAISPDDSDEEN

SEQ ID NO: 75434 - protein, 63 aa, Homo sapiens
KYSPTSPTYSPTSPKYSPTSPTYSPTSPKGSTYSPTSPGYSPTSPTYSLTSPAISPDDSDEEN

SEQ ID NO: 75435 - protein, 151 aa, Homo sapiens
KLTQLQPQLAQLQPNLTHKYTPTSPSYSPSSPEYTPTSPKYSPTSPKYSPTSPKYSPTSPTYSPTTPKYSPTSPTYSPTSPVYTPTSPKYSPTSPTYSPTSPKYSPTSPTYSPTSPKGSTYSPTSPGYSPTSPTYSLTSPAISPDDSDEEN

SEQ ID NO: 75436 - protein, 169 aa, Homo sapiens
KLLPFQPTIHTTVSNLYPKLTQLQPQLAQLQPNLTHKYTPTSPSYSPSSPEYTPTSPKYSPTSPKYSPTSPKYSPTSPTYSPTTPKYSPTSPTYSPTSPVYTPTSPKYSPTSPTYSPTSPKYSPTSPTYSPTSPKGSTYSPTSPGYSPTSPTYSLTSPAISPDDSDEEN

SEQ ID NO: 75437 - protein, 22 aa, Homo sapiens
LADLNNLNIKQYSCLKPLGFSE

SEQ ID NO: 75438 - protein, 22 aa, Homo sapiens
LADLNNLNIKQYSCLKPLGFSE

SEQ ID NO: 75439 - protein, 9 aa, Homo sapiens
RFSFEEQRK

SEQ ID NO: 75440 - protein, 10 aa, Homo sapiens
MNTESLRGEI

SEQ ID NO: 75441 - protein, 46 aa, Homo sapiens
LVGLGGGRLCKRNPESGKPSSKKNHQEYYFWYLELNLPGMQALLPN

SEQ ID NO: 75442 - protein, 46 aa, Homo sapiens
LVGLGGGRLCKRNPESGKPSSFWRLLTFLGLWPPSSNVKASNIAAI

SEQ ID NO: 75443 - protein, 11 aa, Homo sapiens
VARDPAAAGGK

SEQ ID NO: 75444 - protein, 78 aa, Homo sapiens
LLPGDRSGGPPLPRTHALAFVPLGVTPASTGTRLSRRVLISESLLSRGLLSSRFRPVGLGSPDWSWRSNGCAGTKLKT

SEQ ID NO: 75445 - protein, 118 aa, Homo sapiens
LLPGDRSGGPPLPRTHALAFVPLGVTPASTGTRLSRRVLISESLLSRGLLSSRFRPVGLGSPDWSWRSNGCAGDSVASSVYKTQNMNNNIYYQSSNLVCLELEYSCLRHILEELEKSK

SEQ ID NO: 75446 - protein, 101 aa, Homo sapiens
LAFVPLGVTPASTGTRLSRRVLISESLLSRGLLSSRFRPVGLGSPDWSWRSNGCAGDSVASSVYKTQNMNNNIYYQSSNLVCLELEYSCLRHILEELEKSK

SEQ ID NO: 75447 - protein, 148 aa, Homo sapiens; identical to SEQ ID NO: 36626

SEQ ID NO: 75448 - protein, 114 aa, Homo sapiens
MPARQSHQNRKMEDAFCGKIVLFEISKRALQLSSQTEFRSSSHAGVQWRNLSSPQPPPPGFKRFSCLSLLITWDYRHVPPHLANFVFLVEMGFLHVGQAGLELLTSGDPPTSAS

SEQ ID NO: 75449 - protein, 37 aa, Homo sapiens
LLELLERRLYGDPRNQGPCKPEFVPCGESLSEEKLGC

SEQ ID NO: 75450 - protein, 133 aa, Homo sapiens
KYTPTSPSYSPSSPEYTPTSPKYSPTSPKYSPTSPKYSPTSPTYSPTTPKYSPTSPTYSPTSPVYTPTSPKYSPTSPTYSPTSPKYSPTSPTYSPTSPKGSTYSPTSPGYSPTSPTYSLTSPAISPDDSDEEN

SEQ ID NO: 75451 - protein, 31 aa, Homo sapiens
VCMHACGLEKLWRLITFHYICVTVKQLLCVM

SEQ ID NO: 75452 - protein, 21 aa, Homo sapiens
MKLLCTESYQCGENIRHAYRE

SEQ ID NO: 75453 - protein, 35 aa, Homo sapiens
VAEKAAGRRRRRRRRLWRPQSGSWLRPQPHHGDAC

SEQ ID NO: 75454 - protein, 37 aa, Homo sapiens
VQLVESGGGLVQPGGSLRLSCAASVFTFSNSDINWVL

SEQ ID NO: 75455 - protein, 59 aa, Homo sapiens
MSAGKEGTCSERKFVRKRGWTWALNPGVRGSAPRRQLPHPQSGPQKPPGGREDALNPGG

SEQ ID NO: 75456 - protein, 283 aa, Homo sapiens; identical to SEQ ID NO: 26869

SEQ ID NO: 75457 - protein, 422 aa, Homo sapiens; identical to SEQ ID NO: 37198

SEQ ID NO: 75458 - protein, 15 aa, Homo sapiens
VCRGCAAGDRYPGVA

SEQ ID NO: 75459 - protein, 17 aa, Homo sapiens
ISTNTLTDMGSFDRRES

SEQ ID NO: 75460 - protein, 40 aa, Homo sapiens [sequence omitted]

SEQ ID NO: 75461 - protein, 24 aa, Homo sapiens
MWPYTSPGRNGVSLMRLKDACTVM

SEQ ID NO: 75462 - protein, 12 aa, Homo sapiens
MSEISVLTMERT

SEQ ID NO: 75463 - protein, 33 aa, Homo sapiens
VAILVFVDERILTFENLKKRGLHQGTCIVRGSG

SEQ ID NO: 75464 - protein, 112 aa, Homo sapiens
LALSPRLECSGAIIAHHSLKLGVTSKGCWGLGGRGEEVGLSNLLSLLVLCRQPESGRTLCEWGGWTVISAGESLKLGSPPPGASAQRLRVQFEDVHLDLRFRGTFCPSDSKL

SEQ ID NO: 75465 - protein, 654 aa, Homo sapiens
MKSVIPSDGPSVACVKKASYLDCIRAIAANEADAVTLDAGLVYDAYLAPNNLKPVVAEFYGSKEDPQTFYYAVAVVKKDSGFQMNQLRGKKSCHTGLGRSAGWNIPIGLLYCDLPEPRKPLEKAVANFFSGSCAPCADGTDFPQLCQLCPGCGCSTLNQYFGYSGAFKCLKDGAGDVAFVKHSTIFENLANKADRDQYELLCLDNTRKPVDEYKDCHLAQVPSHTVVARSMGGKEDLIWELLNQAQEHFGKDKSKEFQLFSSPHGKDLLFKDSAHGFLKVPPRMDAKMYLGYEYVTAIRNLREGTCPEAPTDECKPVKWCALSHHERLKCDEWSVNSVGKIECVSAETTEDCIAKIMNGEADAMSLDGGFVYIAGKCGLVPVLAENYNKSDNCEDTPEAGYFAIAVVKKSASDLTWDNLKGKKSCHTAVGRTAGWNIPMGLLYNKINHCRFDEFFSEGCAPGSKKDSSLCKLCMGSGLNLCEPNNKEGYYGYTGAFRCLVEKGDVAFVKHQTVPQNTGGKNPDPWAKNLNEKDYELLCLDGTRKPVEEYANCHLARAPNHAVVTRKDKEACVHKILRQQQHLFGSNVTDCSGNFCLFRSETKDLLFRDDTVCLAKLHDRNTYEKYLGEEYVKAVGNLRKCSTSSLLEACTFRRP

SEQ ID NO: 75466 - protein, 95 aa, Homo sapiens; identical to SEQ ID NO: 24744

SEQ ID NO: 75467 - protein, 25 aa, Homo sapiens
RTCVTLTNSLKMVGHPYQRKQFFCW

SEQ ID NO: 75468 - protein, 15 aa, Homo sapiens
LLEDLNLMKEEKYQF

SEQ ID NO: 75469 - protein, 95 aa, Homo sapiens; identical to SEQ ID NO: 63876

SEQ ID NO: 75470 - protein, 45 aa, Homo sapiens; identical to SEQ ID NO: 63977

SEQ ID NO: 75471 - protein, 71 aa, Homo sapiens; identical to SEQ ID NO: 74932

SEQ ID NO: 75472 - protein, 36 aa, Homo sapiens
LGTQTYTCNVDHKPSNTKVDKTVDPEASARPTHAHN

SEQ ID NO: 75473 - protein, 112 aa, Homo sapiens; identical to SEQ ID NO: 20611
